(19) United States
(12) Patent Application Publication
(10) Pub. No.: US 2024/0240241 A1
(43) Pub. Date: Jul. 18, 2024

(54) RNA PRINTING AND SEQUENCING DEVICES, METHODS, AND SYSTEMS

(71) Applicant: The Trustees of Columbia University in the City of New York, New York, NY (US)

(72) Inventors: Peter A. Simms, Ardsley, NY (US); Sayantan Bose, Collegeville, PA (US); Jinzhou Yuan, Edgewater, NJ (US)

(21) Appl. No.: 18/467,510

(22) Filed: Sep. 14, 2023

Related U.S. Application Data
(63) Continuation of application No. 16/766,928, filed on May 26, 2020, now Pat. No. 11,788,120.
(60) Provisional application No. 62/590,889, filed on Nov. 27, 2017.

(51) Int. Cl. C12Q 1/6834; B01L 3/00; C12Q 1/686; C12Q 1/6869

(52) U.S. Cl. CPC C12Q 1/6834; B01L 3/5027; B01L 2300/0829; C12Q 1/686; C12Q 1/6869

(57) ABSTRACT

Described herein are devices, systems, and methods for trapping single-cell lysates in sealed, microwells capable of printing RNA on glass or capturing RNA on beads. These provide efficient, inexpensive manipulation of RNA from individual cells suitable for single-cell transcriptomics on a large scale. Also described are dual barcode capture beads and merged barcode capture beads.

### STATEMENT OF GOVERNMENTAL INTEREST

[0001] This invention was made with government support under Contract Nos. EB016071 and CA202827 awarded by the National Institutes of Health. The government has certain rights in the invention.

### SEQUENCE LISTING

[0002] The text of the computer readable sequence listing filed herewith, titled “39989-303_SEQUENCE_LISTING”, created Sep. 14, 2023, having a file size of 8,992,584 bytes, is hereby incorporated by reference in its entirety.

### BACKGROUND

[0003] Single cell analysis is important for understanding how cells respond to drugs and other perturbations because phenotypic responses are asynchronous and cells are often both genetically and epigenetically heterogeneous. In the absence of artificial or external perturbations, the natural processes of cellular differentiation during development and malignant transformation in cancer also occur asynchronously and give rise to phenotypic heterogeneity. While single cell RNA-Seq is emerging as a high-dimensional and increasingly scalable tool for assessing phenotypic heterogeneity, many aspects of cellular phenotype cannot be inferred from the transcriptome alone. However, high-content imaging by microscopy could greatly expand the space of observables in a single cell analysis, particularly if it can be integrated with single cell RNA-Seq. High-content imaging assays using optical microscopy provide access to numerous phenotypic observables for cellular metabolism, protein localization, protein synthesis, cell cycle states, and cell signaling all with single cell resolution. However, existing tools for merging single cell imaging and sequencing are expensive, low-throughput, and incompatible with short-term cell culture and stimulation. The instant disclosure addresses this issue by combining a highly scalable microfluidic platform for single cell RNA-Seq and imaging with associated methodologies that allow for the association of sequence barcodes for inexpensive pooled library preparation with optical barcodes in devices described herein.

### SUMMARY

[0004] The disclosure allows for devices, systems, and methods relating to genome-wide profiling of RNA from hundreds to thousands of individual cells in parallel for only a few cents per cell. The devices, systems, and methods described herein address the scalability problem of parallel preparation of low-input single cell libraries for RNA sequencing. Devices, systems, and methods described herein allow for parallel RNA profiling of individual cells in a device that is compatible with short term cell culture, drug stimulation experiments, and high-content fluorescence imaging. In an aspect, this is because the cells are physically segregated into microwells but still in sufficiently close proximity to communicate via diffusible factors.

[0005] In an aspect, the disclosure provides for a device or system comprising
[0006] (a) one or more mRNA capture beads;
[0007] (b) one or more cell-identifying optical barcodes;
[0008] (c) a plurality of chambers, microchambers, or microwells comprising one or more mRNA capture beads and/or one or more cell-identifying optical barcodes; and
[0009] (d) wherein the plurality of chambers, microchambers, or microwells comprising one or more mRNA capture beads and/or one or more cell-identifying optical barcodes are configured for reversible sealing.

[0010] In an aspect, the disclosure provides for a method of drug discovery, drug profiling, and/or drug testing comprising
[0011] (a) combining one or more mRNA capture beads with one or more cell-identifying optical barcodes;
[0012] (b) adding one or more mRNA capture beads with one or more cell-identifying optical barcodes to a plurality of chambers, microchambers, or microwells;
[0013] (c) wherein the plurality of chambers, microchambers, or microwells including one or more mRNA capture beads and one or more cell-identifying barcodes are configured for reversible sealing; and
[0014] (d) adding one or more drugs to the plurality of chambers, microchambers, or microwells configured for reversible sealing; and
[0015] (e) adding one or more cells to the plurality of chambers, microchambers, or microwells that are configured for reversible sealing.

[0016] In an aspect, the one or more optical barcodes include one or more optical barcode sequences. In another aspect, the one or more optical barcodes include one or more fluorescent dyes including different colors and/or intensities.

[0017] The disclosure further provides for method of drug discovery, drug profiling, and/or drug testing described herein comprising (f) adding a buffer to the plurality of chambers, microchambers, or microwells configured for reversible sealing. In an aspect, the buffer includes a lysis buffer.

[0018] The disclosure further provides for a method of drug discovery, drug profiling, and/or drug testing comprising analyzing said cell-identifying optical barcode sequences by fluorescence.

[0019] In another aspect, the device or system of described herein comprise a plurality of chambers, microchambers, or microwells attached to a polysiloxane substrate. In yet another aspect, said polysiloxane substrate comprises polydimethylsiloxane.

[0020] In another aspect, the device or system described herein comprise cell-identifying optical barcode sequences are adapted for fluorescence detection.

[0021] In yet another aspect, the device, system, or methods comprise cells and said cells are not arranged in a droplet configuration.

[0022] In another aspect, the disclosure provides for a method for single cell RNA capture and sequencing, wherein said method comprises
[0023] (a) introducing at least one cell into a microwell, wherein the microwell is attached to a first substrate that faces a second substrate and wherein oligo primers are attached to the surface of said second substrate;
[0024] (b) hybridizing mRNA molecules to the surface of said second substrate;
[0025] (c) adding at least one buffer to the microwell; and
[0026] (d) contacting said first substrate with said second substrate, thereby creating a seal between said first substrate and said second substrate.

[0027] In yet another aspect, the disclosure provides for a device for single cell RNA capture and sequencing, wherein said device comprises a plurality of microwells; wherein said plurality of microwells are attached to a first polysiloxane substrate; a second substrate comprising glass that faces said first substrate, wherein oligo primers are grafted onto to the glass surface of said second substrate.

[0028] The disclosure further provides for a microwell comprising a composition comprising one or more mRNA capture beads; one or more cell-identifying optical barcode sequences; one or more cells, one of more buffers.

[0029] In another aspect, the disclosure provides for a plurality of dual barcode oligonucleotide capture beads, each capture bead comprising a first and a second plurality of oligonucleotide sequences separately attached to an outer surface of the capture bead, wherein the first plurality is an oligonucleotide sequence comprising:
[0030] (a) a PCR handle attached to each capture bead, wherein the PCR handle is identical in each oligonucleotide sequence on each capture bead;
[0031] (b) a first barcode attached to the PCR handle, wherein the first barcode is identical for all oligonucleotide sequences attached to the same capture bead, and wherein the first barcode differs for each capture bead;
[0032] (c) a unique molecular identifier (UMI) of length 6 to 16 nucleotides (nt) attached to the barcode, wherein the UMI may differ between oligonucleotide sequences on the capture bead, wherein the UMI may differ between different capture beads; and
[0033] (d) an oligo(dT) attached to the UMI;

[0034] wherein the second plurality is an oligonucleotide sequence comprising (a), (b), (c), (d) and a second barcode attached to the oligo(dT),

[0035] wherein the second plurality of oligonucleotide sequences represents 0.1% to 10% of attached oligonucleotide sequences.

[0036] In an embodiment, the second barcode is configured to identify a cell associated with the capture bead, and to identify the first barcode. Preferably, the second barcode is configured to be read by fluorescence hybridization.

[0037] In an embodiment of the dual barcode bead, the UMI is of length 6 nucleotides (nt) to 10 nt, or the UMI length may be 6 nt. In an embodiment the second barcode is of length 8 nt to 30 nt, or of length 8 nt to 15 nt, or of length 8 nt. Preferably, the dual barcode capture bead is in the form of a plurality of capture beads.

[0038] In another embodiment, the disclosure provides for a plurality of merged barcode oligonucleotide capture beads, each capture bead comprising a plurality of oligonucleotide sequences separately attached to an outer surface of the capture bead, wherein each oligonucleotide sequence comprises:
[0039] (a) a PCR handle attached to each capture bead, wherein the PCR handle is identical in each oligonucleotide sequence on each capture bead;
[0040] (b) a barcode attached to the PCR handle, wherein the barcode is configured for identification of the attached capture bead and associated cell, wherein the barcode comprises N blocks, wherein each block is an oligonucleotide sequence of length 8 nt to 30 nt chosen from one of N sets of M oligonucleotides, wherein N is at least 2 and M is at least 30;
[0041] (c) a unique molecular identifier (UMI) of length 6 to 16 nucleotides (nt), wherein the UMI is either (i) attached to the barcode or (ii) segments of the UMI appear before or between or after the blocks of oligonucleotides, wherein the UMI may differ between oligonucleotide sequences on the capture bead, and wherein the UMI may differ between different capture beads; and
[0042] (d) an oligo(dT) attached to the UMI.

[0043] The variable N represents the number of blocks and an equivalent number of oligonucleotide sets containing M oligonucleotides. The number N of blocks/sets may be up to 4, 6, 8, 10, or more. A set of M oligonucleotides may have up to 200, 300, 400, or more oligonucleotides. In an embodiment of the merged barcode capture bead, N is 2 and Mis 96. In another embodiment, the UMI is of length 6 nt to 10 nt, or the UMI is of length 6 nt. In another embodiment, the identification of the attached capture bead is by on-bead sequential fluorescence hybridization or on-bead sequencing.

[0044] In another embodiment, the disclosure provides for a method for single cell RNA capture and sequencing, wherein the method comprises (a) introducing into a microwell a cell and an oligonucleotide capture bead, wherein the microwell is formed from a first substrate that faces a second substrate; and (b) adding at least one buffer to the microwell. The first substrate and second substrate may be unitary in structure. In an embodiment, the capture beads are dual barcode or merged barcode capture beads. In another embodiment of this method, the first and/or second substrate is a polysiloxane substrate. In another embodiment the first and/or second substrate is polydimethylsiloxane (PDMS). The method may also include another step (e) analyzing the sealed first substrate and second substrate by microscopy or fluorescence, preferably on-bead microscopy or on-bead fluorescence. Preferably, the buffer comprises a lysis buffer.

[0045] In another embodiment, the disclosure provides a device for single cell RNA capture and sequencing, wherein said device comprises (a) a plurality of capture beads, (b) a first substrate comprising a plurality of microwells, and (c) a second substrate that faces said first substrate. In an embodiment of the device, the first and/or second substrates are polysiloxane substrates. In another embodiment, the first and/or second substrates are PDMS substrates. In another embodiment, the capture beads are dual barcode or merged barcode capture beads. In another embodiment of the device, individual capture beads are distributed in individual microwells.

### BRIEF DESCRIPTION OF THE FIGURES

[0046] FIG. 1A provides for fluorescence imaging of a microwell array loaded with optically barcoded beads after introduction and hybridization of a single optical barcode probe. The brighter beads contain optical barcode oligonucleotides that are complimentary to the probe. FIG. 1B provides for a series of 12 fluorescence images from each of two beads in the microwell array device after introduction of each of 12 barcoded probes. When a probe is complimentary to optical barcode oligonucleotides on the bead surface, the bead becomes fluorescent, resulting in the 12-digit binary code that corresponds to a sequence attached to the capture oligonucleotides on the bead.

[0047] FIG. 2A shows schematic and fluorescence imaging data for single cell RNA capture on beads. (FIG. 2A) For mRNA capture on polymer beads, the microwell array is fabricated in a thin PDMS layer on top of a glass slide or coverslip with a microfluidic flow channel above. Cells are first deposited in the microwell array by gravity followed by beads (while circles) covalently functionalized with oligo(dT) primers (orange circular outlines). A lysis buffer is introduced followed by rapid displacement of fluid in the channel with oil, which conformally seals the array. Single cell lysates (green) become trapped in individual microwells and mRNA hybridizes to the oligo(dT) on the beads (red circular outlines).

[0048] FIG. 2B contains images of single cell RNA capture on beads. The top panel is a bright field/fluorescence overlay of a microwell array in which four microwells contain a bead, but only one contains both a bead and a cell (fluorescently labeled with live stain). The middle panel is a fluorescence image of the array after RNA capture, reverse transcription, and staining with SYTOX Orange. Note that the bead associated with a cell is significantly brighter than the other beads. The bottom panel is a fluorescence image of beads in an array from a negative control experiment involving no RNA or cells, showing that the beads have a certain level of background fluorescence in the presence of stain, which explains the majority of the background signal observed in the beads with no cell in the middle panel.

[0049] FIGS. 3A and 3B provide for combinatorial scheme for synthesis of barcoded capture beads. As illustrated in FIG. 3A, beads are first attached to a set of barcoded oligonucleotides in a multi-well plate, pooled into a single tube, and then re-distributed into a second multi-well plate for combinatorial addition of a second barcode sequence and capture site (oligo(dT)). FIG. 3B provides for detailed molecular biology for solid-phase, combinatorial barcode synthesis. A first barcode sequence is copied onto a dual-biotinylated oligonucleotide containing the T7 promoter sequence and a partial Illumina adapter using DNA polymerase. The resulting double-stranded DNA is conjugated to streptavidin-coated beads, and the non-biotinylated strand is removed. After pooling and expanding the beads, a second reaction is used to add a second barcode sequence and oligo(dT) by priming off of a universal anchor sequence that follows the first barcode.

[0050] FIGS. 4A-4C provide for a schematic and fluorescence imaging data for single cell RNA printing. As shown in FIG. 4A, cells are first deposited in the microwell array by gravity. The glass surface opposite the microwell array is covalently functionalized with oligo(dT) primers for mRNA capture (orange line). The device is then rapidly and conformally sealed against a glass surface in the presence of lysis buffer, flipped over, and held in a sealed position using negative pressure. Single cell lysates (green) become trapped in the sealed microwells, and mRNA hybridizes to the oligo(dT) primers on the glass surface, resulting in single cell mRNA “prints” (red lines). As shown by FIG. 4B an array of single cell mRNA prints on a glass coverslip generated using the device in FIG. 4A and imaged after on-chip reverse transcription. The double-stranded RNA/DNA hybrids are stained with SYTOX Orange, an intercalator dye and imaged on the glass surface. >96% of the prints result from individual cells. Note that the bright spots in the image that are not registered with the array originate from genomic DNA aggregates that were not fully removed by DNase digestion. FIG. 4C shows close-up images of single cell RNA printing. The left-most panel is a bright field image of three cells in individual microwells of the array, the middle panel is a fluorescence image of the corresponding RNA prints on the glass surface after reverse transcription and staining with SYTOX Orange, and the right-most panel is a fluorescence image of the glass surface after RNase digestion, demonstrating that the fluorescent prints originate from captured RNA.

[0051] FIGS. 5A-5C provide for an example flow cell device for single cell RNA-Seq. (A) Graphical representation of our five-lane microwell array flow cell device for single cell RNA-Seq. FIG. 5B shows a schematic of on-chip steps for single cell RNA-Seq. After depositing cells, barcoded capture beads (barcode sequences represented as different colors), and sealing as in FIG. 2A, single cell lysates (green) are trapped in individual microwells and mRNA hybridizes to the barcoded capture beads. The device is unsealed and rapidly washed by flow before on-chip, solid-phase reverse transcription and second-strand synthesis followed by elution and pre-amplification of the pooled library by in vitro transcription. FIG. 5C shows a montage of fluorescence images from part of one lane of the device in FIG. 5A showing beads (red) and cells (blue) loaded in the array. Note that this image was acquired following cell lysis while the device is sealed, and so the blue live stain fills the entire volume of the corresponding microwell and is confined to the microwell by sealing.

[0052] FIGS. 6A and 6B show an analysis of single cell RNA-Seq data. FIG. 6A shows a gene body distribution for uniquely mapped reads showing that we are primarily sequencing the 3′-end of transcripts, as expected. FIG. 6B shows a histogram of the number of genes detected per cell for the 396 single cell profiles used in all subsequent analysis of Experiment 1 and 247 single cell profiles used in all subsequent analysis of Experiment 2.

[0053] FIGS. 7A-7C provide for (FIG. 7A) a comparison of single cell median and population-level RNA-Seq profiles for cells originating from the U87-exclusive lane in Experiment 1. Each data point was obtained by constructing a median profile from a given number of cells and repeating this ten times by random sampling with replacement to obtain a median Pearson correlation coefficient and error bar (SEM). This exercise was repeated for comparison to both the U87 and MCF10a bulk RNA-Seq profiles to demonstrate better concordance between the U87 single cell profiles and the U87 bulk profile. FIG. 7B provides for the same as FIG. 7A, but for single cell profiles in the MCF10a-exlusive lane. As shown in FIG. 7C, differential expression analysis was conducted to obtain cell type-specific gene sets for the U87 and MCF10a cells based on single cell profiles from the pure-cell lanes. Here, we show a histogram of log-ratio of the coefficients of variation (CVs) for the cell type-specific gene sets between the mixed lane profiles and the profiles from the respective pure lanes. As expected, the heterogeneity given by CV is greater for cells in the mixed lanes than in the cell type-exclusive lanes for the cell type-specific genes.

[0054] FIGS. 8A-8C provide for cell type separation by single cell RNA-Seq.

[0055] FIG. 8A: iPAGE gene ontology/pathway analysis based on rank-ordering of differentially expressed genes using +/−(1-p) where p is the p-value for differential expression between the U87—and MCF10a-exclusive lanes given by the Wilcoxin rank-sum test. Values are positive for genes more highly expressed in U87 and negative for genes more highly expressed in MCF10a. FIG. 8B: t-SNE clustering of 396 single cell profiles based on the differentially expressed genes color-coated by the lane-of-origin of each profile. Two clear spatial clusters form and each is predominantly associated with a specific cell type-exclusive lane. FIG. 8C shows the same t-SNE clustering shown in (FIG. 8B) but color-coated with a score indicating expression of the U87-specific genes vs. the MCF10a-specific genes. The score is based on the relative rank ordering of U87and MCF10a-specific genes in each cell.

[0056] FIG. 9 provides for a schematic of a reversible PDMS-based device in one aspect of the disclosure.

[0057] FIG. 10 describes ingle Cell RNA-Seq of U87 and MCF10a Cell Lines ˜600 cells paired with beads in five-lane microfluidic device.

[0058] FIG. 11 shows the number of reads associated with each cell-identifying barcode showing a sharp change in slope at ˜350 barcodes, consistent with the ˜350 cell-bead pairs loaded in the microwell array. The remaining cell-identifying barcodes originate either from sequencing error or ambient, background mRNA hybridizing to beads in the device that were not associated with a cell.

[0059] FIG. 12 is a histogram showing that the number of genes detected per individual cell ranges from 1,000 to 17,000 (˜3,400 genes per cell on average).

[0060] FIG. 13A and FIG. 13B describes a representative example of the capabilities described herein for linking high content imaging to single cell sequencing. For example, introducing 4 different at 6 intensities generates 6+ or 1296 optical barcodes (FIG. 13A).

[0061] FIGS. 14A and 14B provides for (FIG. 14A) a fluorescence image of beads with different fluorescent colors generated by combinatorial mixing of different fluorescent dyes at different concentrations. Each color combination and intensity represents a different sequence barcode for mRNA capture that is also attached to the bead. In this example the optical barcodes themselves are not sequences. FIG. 14B shows the intensity distribution for the beads in one of the three fluorescence channels demonstrating our ability to separate the optical barcodes based on fluorescence intensity (in this case with five different intensity levels).

[0062] FIG. 15A shows work flow of the synthesis of dual-barcoded mRNA capture beads.

[0063] FIG. 15B is a schematic illustration of oligo sequence composition on dual-barcoded mRNA capture beads (upper-right).

[0064] FIG. 15C is a look-up table linking sequencing barcode sequence with optical barcode sequence.

[0065] FIG. 16A shows representative images from optical phenotyping of cells and from optical demultiplexing of beads.

[0066] FIG. 16B is a histogram of bead intensity after each of the 12 rounds of probe hybridization.

[0067] FIG. 16C is histogram of optical barcode sequence occurrences.

[0068] FIG. 17A is an illustration of the design of the automated reagent delivery and imaging system for optical demultiplexing.

[0069] FIG. 17B illustrates optical demultiplexing work flow. Scale bar: 200 μm.

[0070] FIG. 18A is a histogram of the fraction of molecules uniquely aligned to the human transcriptome for a mixed species analysis including human U87 and mouse 3T3 cells.

[0071] FIG. 18B is a histogram of the number of uniquely aligned molecules per cell.

[0072] FIG. 18C is a histogram of the genes detected per cell.

[0073] FIG. 18D is a chart of the number of molecules detected (bottom-left) per cell as a function of the fraction of uniquely aligned reads sampled.

[0074] FIG. 18E is a chart of the number of genes detected (bottom-right) per cell as a function of the fraction of uniquely aligned reads sampled.

[0075] FIG. 19 shows gel electrophoresis analysis of the bead-free oligo PCR product from a first (left) and second (right) round of bead synthesis reactions.

[0076] FIGS. 20A and 20B show capillary electrophoresis analysis of the gel-purified bead-free oligo PCR product from a first round (FIG. 20A) and a second round (FIG. 20B) of bead synthesis reactions.

[0077] FIGS. 21A and 21B present integrated sequencing and imaging data for a mixed species experiment.

[0078] FIG. 22 illustrates bead design for a merged barcode oligonucleotide, with oligonucleotides attached to optically barcoded mRNA capture beads that enable simultaneous sequencing-based and optical demultiplexing of the same barcode sequence.

[0079] FIG. 23 is a schematic of optical demultiplexing by sequential fluorescence hybridization with combinatorial oligonucleotide pools (M=4, N=3) from merged barcode capture beads.

[0080] FIG. 24 is a fluorescence/bright field overlay image of microwell array filled with optically barcoded mRNA (merged barcode) capture beads during one cycle of optical demultiplexing, wherein as expected roughly half of the beads are highly fluorescent (bright state).

[0081] FIG. 25 is a length distribution of cDNA obtained using conventional RNA-seq beads and SCOPE-SeqV2 (merged barcode) beads measured on a high sensitivity bioanalyzer chip, showing almost identical results for the conventional RNA-seq and SCOPE-SeqV2 beads.

[0082] FIG. 26 is an image produced by merging the monochrome images of the same field of view in bright field, Cy3, and Cy5 channels.

[0083] FIG. 27 is a scatter plot of the log 2 transformed mean intensities of individual beads in the Cy3 and Cy5 channels.

### DETAILED DESCRIPTION

[0084] In an aspect, the disclosure provides for a microwell array system, devices, and methods for pairing individual cells with mRNA capture beads. In another aspect, the disclosure provides for a microwell array system, device, and methods for pairing individual cells with mRNA capture beads that introduce, cell-identifying barcode sequences into cDNA generated after mRNA capture. In an aspect, the system is compatible with high-content cellular imaging and drug stimulation experiments.

[0085] The disclosure further provides for capture beads, for example mRNA capture beads, or probes comprising one or more optical barcodes described herein. In an aspect, the capture beads, for example mRNA capture beads, or probes are used to identify drug and/or to be used in drug simulation experiments.

[0086] In an aspect, the disclosure provides for devices, systems, and/or methods wherein cells are arranged in a grid and/or a chamber. In yet another aspect, the disclosure provides for devices, systems, and/or methods wherein cells are arranged in a grid and/or chamber as compared to devices, systems, and/or methods wherein cells are arranged in droplets or a configuration where cells are physically segregated from one another. In an aspect, a microfluidic device, system, or method described herein comprises a flow cell with an array of microwells embedded in either the top or bottom of the device. In another aspect, the device described herein is a solid state device that allows for single cell isolation, imaging, and/or uniform parallel introduction of reagents to a plurality of cells.

[0087] The disclosure provides for devices, systems, and/or methods wherein cells are arranged in a reversible chamber or microchamber wherein the chamber and/or microchamber can be open and/or closed. The disclosure also provides for devices, systems, and/or methods wherein cells are arranged in reversible chamber or microchamber where the chamber and/or microchamber can be opened or closed as compared to devices, systems, and/or methods wherein cells are arranged in non-reversible droplets or a non-reversible configuration wherein cells are physically segregated from one another. In such a non-reversible configuration, the droplets and/non-reversible configuration wherein cells are physically segregated cannot be readily toggled back and forth, that is, may not be opened or closed. As a result, in a non-reversible configuration, fluidics cannot be uniformly distributed to the cells and then uniformly removed and replaced by a second fluid.

[0088] The disclosure further provides for devices or system comprising
[0089] (a) one or more capture beads, for example mRNA capture beads;
[0090] (b) one or more cell-identifying barcode sequences, for example, optical barcode sequences;
[0091] (c) a plurality of chambers or microchambers including one or more mRNA capture beads and/or one or more cell-identifying barcode sequences;
[0092] (d) wherein the plurality of chambers or microchambers including one or more mRNA capture beads and/or one or more cell-identifying barcode sequences are reversible and are capable of being opened or closed more than a single time.

[0093] In an aspect, the disclosure provides for devices or system comprising
[0094] (a) one or more mRNA capture beads;
[0095] (b) one or more cell-identifying barcode sequences;
[0096] (c) a plurality of chambers or microchambers including one or more mRNA capture beads and/or one or more cell-identifying barcode sequences;
[0097] (d) wherein the plurality of chambers or microchambers including one or more mRNA capture beads and/or one or more cell-identifying barcode sequences are reversible and are capable of being opened or closed more than a single time; and
[0098] (e) wherein the device or system does not comprise a droplet microfluidics device or does not include droplet microfluidic technology, nonoliter droplet technology, and/or droplet sequence, “Drop-seq,” “Drop-seq single cell analysis” technology, and/or technology wherein cells are captured in “droplets.”

[0099] The disclosure further provides for probes comprising one or more mRNA capture beads and one or more cell-identifying barcode sequences associated or coupled with the one or more mRNA capture beads.

[0100] The disclosure further provides for compositions comprising one or more mRNA capture beads and one or more cell-identifying barcode sequences associated or coupled with the one or more mRNA capture beads and one or more cells.

[0101] The disclosure further provides for methods of drug discovery, drug profiling, and/or drug testing comprising
[0102] (a) combining one or more mRNA capture beads with one or more cell-identifying barcode sequences;
[0103] (b) adding one or more mRNA capture beads with one or more cell-identifying barcode sequences to a plurality of chambers or microchambers;
[0104] (c) wherein the plurality of chambers or microchambers including one or more mRNA capture beads and one or more cell-identifying barcode sequences are reversible; and
[0105] (d) adding one or more drugs to the reversible chambers or reversible microchambers.

[0106] The disclosure further provides for a probe comprising
[0107] (a) one or more mRNA capture beads;
[0108] (b) one or more cell-identifying barcode sequences, for example, optical barcode sequences;
[0109] (c) a plurality of chambers or microchambers including one or more mRNA capture beads and/or one or more cell-identifying barcode sequences;
[0110] (d) wherein the plurality of chambers or microchambers including one or more mRNA capture beads and/or one or more cell-identifying barcode sequences are reversible and are capable of being opened or closed more than a single time

[0111] The disclosure further provides for methods for single cell RNA capture and sequencing, wherein said method comprises
[0112] (a) introducing at least one cell into a microwell, wherein the microwell is attached to a first substrate that faces a second substrate and wherein oligo primers are attached to the surface of said second substrate;
[0113] (b) hybridizing mRNA molecules to the surface of said second substrate;
[0114] (c) adding at least one buffer to the microwell;
[0115] (d) contacting said first substrate with said second substrate, thereby creating a seal between said first substrate and said second substrate.

[0116] In an aspect, the device, system, and/or microarray is imaged using fluorescence.

[0117] In another aspect, the disclosure provides for a device for single cell RNA capture and sequencing, wherein said device comprises a plurality of microwells; wherein said plurality of microwells are attached to a first polysiloxane substrate; a second substrate comprising glass that faces said first substrate, wherein oligo primers are grafted onto to the glass surface of said second substrate.

[0118] In an aspect, the substrate or surface comprises a polysiloxane substrate. In an aspect, the polysiloxane substrate comprises PDMS. In another aspect, the substrate comprises polymethylmethyacrylate (PMMA). In another aspect, the substrate comprises a thermoplastic for fabrication by, for example, hot embossing. In another aspect, the substrate comprises glass for fabrication by, for example laser machining. In another aspect, the substrate comprises silicon or silicon-on-glass or photoresist-on-silicon.

[0119] In another aspect, a system or device described herein further comprises one or more drugs, buffers, active agents, and/or a plurality of cells.

[0120] In an aspect, the disclosure provides for devices, systems, methods, and/or probes capable of profiling hundreds or thousands of cells from an organ or tumor. In an aspect, the cells analyzed are healthy human cells, abnormal cells, cancer cells, neural cells, immune cells, epithelial cells, mesenchymal cells, or stem cells. Cells could also originate from microorganisms including parasites, fungi, or bacteria. Other units containing nucleic acids such as viruses both in isolation or inside of an infected host cell could be analyzed.

[0121] In yet another aspect, different drugs or chemical constituents or compositions, for example, lysis buffer, may be introduced to a device or system described herein, for example, in a chamber or microchamber, at any time given the reversible nature of the chambers or microchambers. This provides for additional flexibility and advantages over other devices or systems, such as those employing, for example, droplet microfluidic technology, nanoliter droplet technology, and/or droplet sequence, “Drop-seq,” “Drop-seq single cell analysis” technology, and/or technology where cells are captured in “droplets.”

[0122] In an aspect, the device or system described herein, for example, the microfluidic device does not involve any on-chip valves and/or moving parts, which can result in a high feature density. In another aspect, the device or system described herein is not a droplet microfluidics device or does not include droplet microfluidic technology, nonoliter droplet technology, and/or droplet sequence, “Drop-seq,” “Drop-seq single cell analysis” technology, and/or technology where cells are captured in “droplets.” In an aspect, the device or system described herein is more compatible with cell culture and cell perturbation assays than a droplet microfluidic device because fluids can be readily exchanged in a uniform fashion and cells can communicate with each other via diffusible factors. Hence, cell viability will be higher and cells will exhibit normal physiology in comparison to cells that are sequestered in droplets. In another aspect, in the device or system described herein, cell are arranged in regular array and are in contact with a flat, optically transparent surface as opposed to a droplet microfluidic device in which cells are isolated inside of a spherical enclosure. Therefore, in yet another aspect, the device or system described herein is intrinsically more compatible with imaging, for example optical imaging or microscopy, than droplet devices.

[0123] In an aspect, devices, systems, and methods described herein have a higher throughput than devices, systems, or methods employing droplet microfluidic technology, nonoliter droplet technology, and/or droplet sequence, “Drop-seq,” “Drop-seq single cell analysis” technology, and/or technology where cells are captured in “droplets.” In yet another aspect, analysis of cells, probes, and beads using devices, systems, and methods described herein have a throughput that is 5, 10, 15, 20, 25, or 100 or more times less expensive than devices, systems, or methods employing droplet microfluidic technology, nonoliter droplet technology, and/or droplet sequence, “Drop-seq,” “Drop-seq single cell analysis” technology, and/or technology were cells are captured in “droplets.”

[0124] In another aspect, the device described herein is compatible with automation, for example, a computer-controlled system that is capable of facilitating automated introduction of any of various fluids to the device, temperature control, and reversible sealing of the microwells. Accordingly, in a preferred aspect the device described herein can capture mRNA from thousands of individual cells in parallel and produce pooled, single cell RNA-Seq libraries for ˜$0.10/cell.

[0125] In an aspect, barcoded capture beads are introduced to the microwell array in either a random process or ordered process. In yet another aspect, barcoded capture beads are introduced into the microwell array in a random process with little or no control over which barcoded capture bead enter each microwell. Under such a scenario, in an aspect, imaging information acquired from the cells in the device is not directly associated with the single cell transcriptomes that ultimately are quantified by deep sequencing. In an aspect, this issue is addressed by introducing barcodes, for example, optical barcodes, to the mRNA capture beads that indicate the sequence barcode attached to each bead. In another aspect, the optical barcodes can be read out using the same or different fluorescence microscope used for live cell imaging on the device. In yet another aspect, the disclosure provides for a reagent that allows for the capture RNA from individual cells, allows for association of a unique sequence barcode with each single cell cDNA library, and/or reveals the identity of the attached sequence barcode by optical methods.

[0126] In an aspect, the disclosure provides for an optical barcode and associated methods described herein. In an aspect, the optical barcode is a sequence. In another aspect, the optical barcode is not a sequence. In another aspect, optical barcodes described herein are not DNA sequences.

[0127] In an aspect, an optical barcode described herein comprises a combination of fluorescent dyes comprising at least one different color and optionally more than one different intensity that make the bead uniquely identifiable on an optical microscope. In another aspect, an optical barcode described herein comprises a combination of fluorescent dyes comprising two, three, four, five or more different colors and optionally more than one different intensity that make a respective bead uniquely identifiable on an optical microscope.

[0128] The disclosure further provides for proteomic methods and systems utilizing a device, probe, or bead described herein. In an aspect, an oligonucleotide-based optical barcode is loaded onto beads that also harbor reactive groups for capturing protein (e.g. amine-, carboxyl-, or thiol-reactive groups). In yet another aspect, optical barcodes are loaded onto beads along with one or more antibodies capable of capturing specific proteins. Proteins can be quantified by fluorescence methods (e.g. fluorescently labeled antibodies) or mass spectrometry. In a further aspect, the disclosure provides for the use of DNA-labeled antibodies that are amplified, identified, and quantified by deep sequencing.

[0129] The devices, systems, and methods described herein provide for key distinctions and advantages over other devices, systems, and methods. For example, the microwell array device is constructed in such a way that it can be reversibly sealed during cell lysis and RNA capture. Significant loss of RNA occurs in our arrays when cells are lysed in unsealed or even imperfectly sealed arrays due to rapid diffusion of RNA molecules. In the context of the bead capture and RNA-Seq experiments, this could result not only in reduced RNA capture, but also significant cross-talk. Herein, advantage is taken of the physical properties of PDMS, namely its flexibility and hydrophobicity, for high-fidelity, reversible sealing which is difficult to achieve using the agarose hydrogel device reported previously. In addition, the devices, systems, and methods described herein demonstrate genome-wide single cell RNA-Seq. Additionally, the single cell capture and pooled library preparation scheme described herein costs $0.10-$0.20/cell even at a relatively modest scale of several hundred cells per run (see, for example, Table 7), compared to the <$1/cell estimated at the 10,000-cell scale for alternative approach, for example, one described in Fan H C, Fu G K, Fodor SPA: Combinatorial labeling of single cells for gene expression cytometry. Science 2015, 347:628-636, which is herein incorporated by reference in its entirety.

[0130] In an aspect, the disclosure provides for optical demultiplexing or optical barcoding of sequence-barcoded capture beads by, for example, attaching a unique combination of short oligonucleotides to each bead. In an aspect, while the sequence barcode associated with the RNA capture primer can be read out by DNA sequencing, the optical barcode can be read out on a standard fluorescence microscope. In another aspect, the oligonucleotide combination is unique to each sequence barcode and can be identified by hybridizing fluorescently labeled complementary oligonucleotides to beads. The presence or absence of a series of fluorescently labeled oligonucleotides on each bead after hybridization indicates the unique combination of short oligonucleotides attached to each bead and therefore the sequence barcode attached to each bead. Once the sequence barcode attached to each bead is identified, single cell transcriptome captured on each bead can be identified and read out using a sequencer with phenotypic information obtained from imaging the cells associated with each bead in each microwell of our device.

[0131] In an aspect, optical barcoding technology described herein is combined with applications beyond single cell RNA-Seq. In an aspect, an extension of the invention is bulk RNA-Seq or RNA-Seq of small numbers of cells. These can be seeded in the microwells or propagated from a single cell seeded in each microwell. The disclosure further provides for single cell DNA-Seq. The disclosure further provides for barcoded capture oligonucleotides that contain oligo(dT) for capturing mRNA from individual eukaryotic cells. Alternatively, the beads are functionalized with primers that are specific to targeted DNA loci or RNA transcripts. In yet another aspect, the beads are functionalized with primers that have a random sequence and can therefore capture any DNA or RNA sequence from an individual cell. In an aspect, in each case, a corresponding optical barcode is used to link imaging data acquired for a target cell or group of cells and sequencing data acquired from whatever nucleic acids are captured on the bead.

[0132] The disclosure further provides for proteomic methods and systems utilizing a device described herein. In an aspect, an oligonucleotide-based optical barcode is loaded onto beads that also harbor reactive groups for capturing protein (e.g. amine-, carboxyl-, or thiol-reactive groups). In yet another aspect, optical barcodes are loaded onto beads along with one or more antibodies capable of capturing specific proteins. Proteins can be quantified by fluorescence methods (e.g. fluorescently labeled antibodies) or mass spectrometry. In a further aspect, the disclosure provides for the use of DNA-labeled antibodies that are amplified, identified, and quantified by deep sequencing.

[0133] Single cell analysis is important for understanding how cells respond to drugs and other perturbations because phenotypic responses are inherently asynchronous.

### PDMS Microwell Flow Cell for Single Cell Transcriptome Capture

[0134] In an aspect, the microfluidic platform described herein comprises a flow cell with an array of microwells embedded in either the top or bottom of the device. In an aspect, the device or system described herein comprises a high-throughput DNA sequencing and digital PCR device, as described in, for example, White A K, VanInsberghe M, Petriv O I, Hamidi M, Sikorski D, Marra M A, Piret J, Aparicio S, Hansen C L: High-throughput microfluidic single-cell RT-qPCR. Proceedings of the National Academy of Sciences of the United States of America 2,011,108(34): 13999-14004 or Men Y, Fu Y, Chen Z, Sims P A, Greenleaf W J, Huang Y: Digital polymerase chain reaction in an array of femtoliter polydimethylsiloxane microreactors. Anal Chem 2012, 84(10):4262-4266, the contents of which are incorporated by reference herein in their entirety.

[0135] In an aspect, fluids can be driven through the flow cell manually by, for example, laminar flow using a syringe or pipette. Fluid exchange in the microwells occurs by diffusion, while cells and beads can be loaded by gravity. The microwell arrays may be fabricated from, a polysiloxane substrate, for example, polydimethylsiloxane (PDMS), a silicone rubber commonly used in soft lithography. PDMS allows inexpensive, rapid, and repeatable fabrication from molds produced on silicon in photoresist using standard photolithography. See, for example, McDonald J C, Whitesides G M: Poly(dimethylsiloxane) as a material for fabricating microfluidic devices. Accounts of chemical research 2002, 35(7):491-499 and First Single Cell Expression Analysis with PDMS, Marcus et al., Analytical Chemistry, 2006. (Quake Lab), which are herein incoprtated by reference in their entirety. In addition, the material properties of PDMS, including its hydrophobicity and flexibility, facilitate reversible sealing of the microwells against a flat surface using mechanical deformation and negative pressure (see, for example, FIG. 2A) or introduction of oil by laminar flow (See, for example, FIG. 3A).

[0136] In an aspect, the device or system described herein is capable of solid-phase capture of RNA from individual cells via two modes of operation-RNA “printing” on glass and RNA capture on beads. For example, in an aspect, in RNA printing mode, individual cells are loaded in the microwells, which are fabricated in a PDMS slab that faces a glass coverslip. Oligo(dT) primers are covalently grafted to the glass surface so that mature mRNA molecules can be immobilized by hybridization of their poly(A) tails. Following the introduction of lysis buffer, the microwells can be sealed by mechanically placing them in conformal contact with the functionalized glass surface. Cell lysis releases mRNA into the solution confined by the microwells, resulting in hybridization to the oligo(dT)-coated glass coverslip. By placing the flow channel under negative pressure, the seal can be maintained in the absence of mechanical force, making the device transportable and readily accessible to an optical microscope. See, for example, White A K, VanInsberghe M, Petriv O I, Hamidi M, Sikorski D, Marra M A, Piret J, Aparicio S, Hansen C L: High-throughput microfluidic single-cell RT-qPCR. Proceedings of the National Academy of Sciences of the United States of America 2011, 108(34): 13999-14004, which is herein incorporated by reference in its entirety.

[0137] Because the mRNA is immobilized on a glass surface, enzymatic processing steps can take place on-chip, simply by sequential flow of reagents through the device. After incubating the trapped, single cell lysates with the glass capture surface, the seal may be released and the flow cell can be rinsed with a detergent-containing buffer followed by a reaction mixture containing DNase. Because the oligo(dT) primers are comprised of locked nucleic acid (LNA), they are resistant to nuclease digestion. See, for example, Koshkin A A, Nielsen P, Meldgaard M, Rajwanshi V K, Singh S K, Wengel J: LNA (locked nucleic acid): an RNA mimic forming exceedingly stable LNA: LNA duplexes. Journal of the American Chemical Society 1998, 120(50): 13252-13253, the content of which is incoroprated by reference in its entirety.

[0138] The immobilized single cell mRNA libraries can then be reverse transcribed in parallel, and the resulting mRNA/cDNA hybrids can be visualized by fluorescence microscopy after staining with a fluorogenic intercalator dye. For example, FIG. 4B illustrates a fluorescence image of single cell transcriptome “prints” arrayed on a glass coverslip as described above. Here, it is further confirmed by running a control experiment that the printed material originates from RNA. While some aggregates of genomic DNA were not fully digested (but are reduced in intensity by DNase treatment), the disclosure further confirms that the vast majority of material imaged in the circular prints originates from RNA. For example, the left-most panel of FIG. 4C shows a bright field image of a microwell array in which three microwells each contain an individual cell. The resulting RNA prints (middle panel) that can be visualized after reverse transcription are ablated by incubating the surface with RNaseH (right-most panel), which selectively digests RNA in RNA/DNA hybrids. Conversion of RNA/DNA hybrids to single-stranded cDNA precludes detection using the intercalator dye, and so removal of RNA from the prints eliminates the fluorescence signal almost completely. FIG. 4C also contains some small fluorescent objects associated with the interstitial walls of the microwell array or with microwells that did not contain a cell. These are substantially reduced in intensity by RNase treatment, confirming that they are, in fact, RNA that is spuriously captured or non-specifically absorbed. These objects could arise due to contamination from dead cells or other sources of freely floating RNA introduced with the cells prior to sealing. Nonetheless, the vast majority of the observed signal in FIG. 4C is associated with the circular mRNA prints that correlate perfectly with microwells that initially contained a cell.

[0139] FIG. 4A shows a second, very similar version of the device where the microwells are fabricated in PDMS on a glass slide, and the sealing is accomplished by laminar flow of oil. Using nearly the same procedures as described above for RNA printing mode, we use this version of the device to capture RNA on beads. After introducing cells, we can load beads into the microwells by gravity and achieve super-Poisson loading by using beads with a mean diameter greater than the radius of the microwells. Like the glass surface in FIG. 4A, we coat the beads in oligo(dT) to facilitate mRNA capture after cell lysis and sealing. FIG. 2B shows bright field and fluorescence images of a bead-containing microwell array loaded with individual cells following solid-phase mRNA capture and reverse transcription. The bead contained in a microwell that also contains a cell is substantially more fluorescent following reverse transcription than the other beads. While there is some fluorescence signal associated with beads that do not contain a cell, this is mainly due to non-specific staining of the high-density of single-stranded primers on the bead surface and non-specific staining of the bead itself, as shown in the third panel of FIG. 2B where we depict fluorescence images of beads in the absence of cells, cell lysate, or RNA as a negative control.

### A Scalable Platform for Single Cell RNA-Seq

[0140] A scalable platform for single cell RNA-Seq based on the bead capture modality is described herein. The low reagent volumes required for microfluidic processing result in a significant cost reduction relative to some conventional methods, for example, as described in Wu A R, Neff N F, Kalisky T, Dalerba P, Treutlein B, Rothenberg M E, Mburu F M, Mantalas G L, Sim S, Clarke M F et al: Quantitative assessment of single-cell RNA-sequencing methods. Nat Methods 2014, 11(1):41-46, which is herein incorporated by reference in its entirety.

[0141] A further reduction in cost can be realized by, for example, using microfluidics in combination with schemes for cDNA barcoding. A representative example of this, such as the CEL-Seq strategy, can be found in Hashimshony T, Wagner F, Sher N, Yanai I: CEL-Seq: single-cell RNA-Seq by multiplexed linear amplification. Cell Rep 2012, 2(3):666-673, which is herein incorporated by reference in its entirety. By introducing a cell-specific barcode to the cDNA during reverse transcription, all subsequent sequencing library preparation steps can be accomplished on pooled cDNA from multiple cells, further reducing hands-on time and reagent consumption.

[0142] A pool of mRNA capture beads was generated in which each bead is attached to ˜1 billion copies of a primer terminated on the 3′-end with one of 960 possible barcode sequences followed by oligo(dT) using a combinatorial synthesis technique (FIGS. 3A and 3B). If, for example, 100 cells loaded into the microwells of a device or system described herein receive a random barcoded bead from the pool, it is expected that the mRNA from ˜95 of them would be uniquely labeled based on the binomial distribution. A copy of the T7 promoter sequence (TPS) and part of an Illumina sequencing adapter (ISA) comprise the 5′-end of the capture primer (Table 1) to allow linear pre-amplification by in vitro transcription (IVT) and library enrichment by PCR (FIG. 3B). To create this large pool of barcoded beads, 96 different barcode-containing oligonucleotides (Table 2) were copies onto a dual-biotinylated oligonucleotide containing TPS and ISA by primer extension with DNA polymerase in a 96-well plate. Each barcode is terminated with a universal, 6-base anchor sequence that becomes the 3′-end of the biotinylated oligonucleotide after the first round of primer extension (FIG. 3B). After this first reaction, each barcoded oligonucleotide was immobilized onto a set of streptavidin-coated Sepharose beads, quench the reaction, combine all of the barcoded beads in a pool, and remove original barcode-containing strand by denaturation. At this point, the pool of beads is split into ten new reactions and each containing one of ten unique second barcodes along with poly(dT) (Table 3) are added to the 3′-end of the immobilized oligonucleotide by primer extension from the universal anchor sequence (FIG. 3B). After quenching this reaction, the beads can be pooled, removing the unbiotinylated strands, and washed. The resulting pool of beads contains 960 barcoded capture primers.

[0143] A PDMS microwell device containing five flow channel lanes for physical multiplexing of samples and >10,000 microwells was constructed (FIG. 5A). The cylindrical microwells are about 50 μm in diameter and height with a volume of <100 pL. In another aspect, the microwells are about 100 μm to about 5 mm, about 5 μm to about 200 μm, about 10 μm to about 100 μm, about 25 μm to about 75 μm, about 30 μm to about 600 μm in diameter and height. In yet another aspect, the microwells comprise a volume of about 10 pL to about pL, about 10 pL to about 100 pL, about 25 pL to about 75 pL, about 25 pL to about 100 pL. In an aspect, cells are loaded in individual microwells randomly, according to Poisson statistics, such that the majority of cell-containing wells contain one cell. The concentration of the cellular suspension can be tuned in order to avoid overloading the microwell array. For example, if ˜100 cells are captured in every 1,000 microwells of a given array, then about <5% of microwells will contain more than one cell. Beads can then be loaded into the wells at a somewhat higher density because the mean diameter of the beads (˜30 μm) significantly reduces the probability double-loading (FIG. 5B and FIG. 5C). In an aspect, depending on the size of the microwell, it is rare to observe both beads and cells in an overloaded microwell. Given the pool of 960 cell-identifying barcodes and five lanes, the capacity of the system described herein for single cell RNA-Seq is ˜600 cells at a unique barcoding rate of >94%. In another aspect, the capacity of the system described herein for single cell RNA-Seq is ˜600 cells at a unique barcoding rate of about greater than 85%, greater than 90%, greater than 91%, greater than 92%, greater than 93%, greater than 94%, greater than 95% or more. In an aspect, the device or systems described herein may be scaled to increase capacity by synthesizing additional barcodes and/or adding microwells to the device or system.

[0144] After loading the cells and barcoded beads, procedures described above and herein can be employed to trap single cell lysates in sealed microwells, immobilizing captured mRNA on beads, and reverse transcribe (FIG. 5B). Following on-chip second-strand synthesis, the pool of single cell libraries can be simultaneously elute and pre-amplify overnight by IVT using T7 RNA polymerase (FIG. 5B). The resulting amplified RNA (aRNA) can be removed from each lane using a pipette, reverse transcribe the aRNA from each lane with primers containing lane-identifying barcodes, the cDNA libraries from all five lanes can be pooled, and enrichment of the sequencing library in a single PCR reaction can be undertaken. The primers used for aRNA reverse transcription contain 8-base unique molecular identifiers (UMIs) so that the vast majority of cDNA molecules are distinguishable. That way, genes can be quantified from sequencing data based on the number of UMIs associated with each gene rather than the number of reads, mitigating noise and bias that result from exponential amplification by PCR. See, for example, Shiroguchi K, Jia T Z, Sims P A, Xie X S: Digital RNA sequencing minimizes sequence-dependent bias and amplification noise with optimized single-molecule barcodes. Proceedings of the National Academy of Sciences 2012, 109(4): 1347-1352 and Shiroguchi K, Jia T Z, Sims P A, Xie X S: Digital RNA sequencing minimizes sequence-dependent bias and amplification noise with optimized single-molecule barcodes. Proceedings of the National Academy of Sciences 2012, 109(4): 1347-1352, which are incorporated by reference in their entirety.

### Demonstration and Analysis of Highly Multiplexed Single Cell RNA-Seq

[0145] In an aspect, the microfluidic device described herein is used to obtain RNA-Seq profiles from ˜600 cells across five lanes from two commonly used human cancer cell lines (described herein as “Experiment 1” throughout the text). One of the five lanes contained U87 human glioma cells, one contained MCF10a human breast cancer cells, and the other three contained a mixture of both cell lines. These two cell lines are highly mesenchymal, have been cultured for numerous passages, and have relatively similar expression profiles. Nonetheless, they are distinguishable by a few key genes and can be readily separated the data set. In addition, in an aspect, a slightly different protocol with less expensive reagents are used to obtain profiles of ˜500 cells across five lanes for a different cell pair (U87 cells and the diploid cell line WI-38, which has not undergone malignant transformation) in Experiment 2.

[0146] A factor with any pooled library scheme is cross-talk between cell-identifying barcodes. As described herein, this issue is addressed by quantitative analysis of Experiment 1. For example, the disclosure provides for methodology wherein cross-talk is quantified by using both sequencing and imaging data. In an aspect, because the device or system described herein is compatible with fluorescence microscopy, a fraction of the streptavidin molecules on each bead can be labelled with red-fluorescent AlexaFluor 647 and pre-stained the cells with a blue-excitable live stain. This allows quantification of the number of cells paired with a barcoded capture bead and also allows for the estimation of the number of barcodes that are expected to be observed in the sequencing data for each lane. The sequencing data reveals that more barcodes are present in the library for each lane than expected based on the imaging data. Analysis reveals that the number of molecules associated with a given barcode placed the barcodes in two distinct populations. The size of the population of barcodes associated with a larger number of molecules was highly consistent with the imaging data (within ˜8%), which we take to demarcate our single cell RNA-Seq profiles. The second, larger population of barcodes with relatively few associated molecules likely results from multiple potential sources including sequencing error, actual cross-talk or spurious capture within our microfluidic device, and PCR jumping as observed in other implementations of multiplex single cell RNA-Seq. Across all five lanes the cell-identifying barcodes that were not associated with actual cells in the device had 200-300× fewer molecules per barcode than those associated with cells (based on the ratio of median unique molecules in the two populations).

[0147] As described in FIGS. 6A and 6B, the systems and devices described herein produce useful single cell RNA-Seq profiles. For example, in an aspect, the library preparation protocol described herein is based on CEL-Seq where, rather than sequencing the full gene body and normalizing by transcript length, the 3′-end of transcripts are sequenced and counted. FIGS. 6A and 6B show the expected distribution of mapping positions for 3′-end sequencing, with most reads mapping to the 3′-UTRs or coding sequences. Subsequent analysis to demonstrate cell type separation using our data set will rely on the 396 single cell profiles that we obtained with the highest coverage. Although 635 genes on average were detected across all cell profiled in Experiment 1, an average of 876 genes from the top 396 cells were detected (FIG. 6B). Hence, the 204 cells that we discard from subsequent analysis have an average of ˜170 genes detected per cell. Similarly, for Experiment 2, an average of 1,030 genes from the top 247 single cell profiles were detected, but ˜530 genes on average across all cells.

[0148] To assess the similarity of our single cell expression profiles to conventional, population-level RNA-Seq, the Pearson correlation between bulk RNA-Seq and single-cell medians constructed from different numbers of individual cells after normalizing by the total number of molecules detected in each cell were calculated (FIG. 7A and FIG. 7B). An analysis on single cell profiles originating from the U87-exclusive and MCF10a-exclusive lanes in Experiment 1 was conducted, randomly sampling the complete sets of profiles ten times without replacement for each point in the curves shown in FIG. 7A and FIG. 7B. This analysis shows that the single cell medians constructed from U87 single cell profiles correlate better with the bulk U87 RNA-Seq profile than with the bulk MCF10a RNA-Seq profile (FIG. 7A), and vice-versa (FIG. 7B). It also shows that the single cell median correlations saturate around r=0.55-0.60 depending on the cell type. As a point of comparison, an analysis for CEL-Seq and DR-Seq gave population-level Pearson correlations of 0.71 and 0.69, respectively. See, for example, Dey S S, Kester L, Spanjaard B, Bienko M, van Oudenaarden A: Integrated genome and transcriptome sequencing of the same cell. Nat Biotechnol 2015, 33(3):285-289, which is herein incorporated by reference in its entirety.

[0149] To further demonstrate the robustness of our data set, classifier for U87 and MCF10a cells in Experiment 1 were built. Single cell profiles from lanes that contained either exclusively U87 cells of MCF10a cells were used to identify 189 differentially expressed genes (p<0.05, Wilcoxin rank-sum test). FIG. 7C shows the log-ratio of the coefficients of variation (CVs) for each of these two genes sets between the mixed lane profiles and the profiles from the respective pure lanes. The log-ratio of CVs is greater than zero (CV ratio greater than one) for 92% of U87-specific genes and 85% of MCF10a-specific genes.

[0150] FIG. 8A shows a pathway analysis of gene ontologies enriched across >11,600 genes that were both detected across our 396 single cell profiles and available in the iPAGE database and ranked based on differential expression in Experiment 1. See, for example, Goodarzi H, Elemento O, Tavazoie S: Revealing global regulatory perturbations across human cancers. Mol Cell 2009, 36(5):900-911, which is herein incorporated by reference in its entirety. A matrix of Spearman correlation coefficients across our 396 profiles based on rank-ordering the 189 differentially expressed genes in each cell was then generated. The data was clustered spatially using the t-stochastic neighborhood embedding (t-SNE) algorithm, described for example in Van der Maaten L, Hinton G: Visualizing data using t-SNE. Journal of Machine Learning Research 2008, 9(2579-2605):85, a clustering algorithm applied to high-dimensional single cell analysis data (FIG. 8B and FIG. 8C). This t-SNE result contains two closely associated clusters of individual cells. To understand the origin of these two clusters, the t-SNE clustering with two different color-schemes are displayed. In FIG. 8B, it is shown how single cell profiles from the various lanes of a device described herein are distributed. One of the two clusters contains all of the cells from the MCF10a-exclusive lane, while the other contains nearly all of the cells from the U87 lane with a few exceptions. Single cell profiles from the mixed lanes are distributed throughout the two clusters. While the single cell profiles from mixed lanes are distributed uniformly throughout the MFC10a cluster, there is some separation between a subset of mixed lane profiles and the U87-exclusive lane profiles in the U87 cluster. In FIG. 8C, the same clustering result with a different color scheme that indicates the relative rank ordering of the U87 vs. MCF10a gene sets in each profile is described. This metric associates the cells in each of the two clusters with the expected cell type-specific expression pattern.

[0151] In an aspect, the microfluidic platforms described throughout are compatible with transcriptome-wide analysis of individual cells by RNA-Seq. In an another aspect, either could be combined with a sequence-based barcoding scheme to generate a pooled cDNA library from hundreds or thousands of individual cells. For example, in the bead capture device, barcoding is not strictly necessary because physical means could be used to extract the beads from the microwells for downstream processing with conventional labware. Alternatively, fluorescently labeled oligonucleotide probes could be used to image captured RNA molecules similar to RNA-FISH. Probes could be introduced sequentially, imaged, and removed in cycles or combined with previously reported multiplexing schemes. Similarly, sequential rounds of qRT-PCR in sealed microwells could allow targeted detection of specific genes or mutations in captured RNA.

Synthesis of Dual-Barcoded mRNA Capture Beads

[0152] In another aspect, dual-barcoded mRNA capture beads were synthesized by the work flow shown in FIG. 15A. Sequence-barcoded mRNA capture beads (MACOSKO-2011-10, ChemGenes) are thoroughly washed with water to remove free-floating oligonucleotides and then immediately evenly distributed into 64 wells on a 96 well plate. The 96 well plate is then sealed, vortexed, and sonicated. In doing so, a small amount of sequence-barcoded mRNA capture oligonucleotides fall off from the beads (bead-free DNA) and get released into the liquid phase. The supernatant from each well (contains bead-free DNA) are collected into separate tubes, converted into double stranded DNA, PCR amplified and indexed, pooled, gel purified, and sequenced (bead-free DNA sequencing data). A unique combination of short oligonucleotides selected from a first set of 6 types of short oligonucleotides and ligation reaction mixture are sequentially added into each of the 64 wells. This results in the attachment of a unique and known combination of oligonucleotides to the beads in each well (FIG. 15B). The sequencing barcode sequence of beads in each well can be obtained from the bead-free DNA sequencing data. Thus, a two-column look-up table (FIG. 15C) is generated where each row represents a bead, one column contains sequencing barcode sequence, and the other column contains a 6-digit optical barcode sequence. The beads are then pooled together and subjected to a second round of split-and-pool synthesis with a different set of 6 types of short oligonucleotides. This generates another two-column look-up table. Each bead appears once in each of the two look-up tables and has a 12-digit binary optical barcode sequence. A total of 4096 types of optically barcoded beads are made. To prevent these newly ligated oligonucleotides from interfering the single-cell RNA-seq library prep steps, a polyethylene glycol (PEG) chain is inserted in the short oligonucleotide.

[0153] It was initially attempted to optically barcode the beads spectrally (i.e., labeling the beads with varying amount of dyes with different emission wavelength). The challenge of this approach is that the emission wavelength of commercially available dyes is rather broad. Only a few distinct dyes can fit on the full spectrum of light thus limiting the barcoding capacity. We then tried to barcoding beads with a combination of short oligonucleotides with different sequences. Attachment methods involving use of DNA polymerase may not work.

### Demultiplexing Work Flow

[0154] 12 rounds of sequential fluorescent in situ hybridization (FISH) were used to read out the 12-digit binary optical barcode sequence. Each round of FISH has four major steps including background scan, probe hybridization (150 nM probes), probe scan, and probe stripping (150 mM NaOH). Here the probes used in each round are fluorophore-labeled short oligonucleotides whose sequences are complementary to each of the 12 short oligonucleotides that was ligated to the beads during bead synthesis step. During each FISH round, two populations of beads were detected in terms of fluorescent intensity in the fluorophore channel. Beads in the population that has a higher and lower intensity are assigned a binary sequence of 1 and 0 respectively. After the full 12 rounds of FISH, a 12-digit binary optical sequence is generated for each bead. FIG. 16A shows representative images from optical phenotyping of cells and from optical demultiplexing of beads. FIG. 16B is a histogram of bead intensity after each of the 12 rounds of probe hybridization. FIG. 16C is histogram of optical barcode sequence occurrences.

### Instrumentation for Automated Optical Demultiplexing

[0155] An automated reagent delivery and scanning system (FIG. 17A) was built for automated on-chip optical demultiplexing (FIG. 17B). The design is illustrated in FIG. 17A. In the automated reagent delivery system, fixed positive pressure was used to drive fluid flow, multichannel rotary selector valves located at the upstream of the microwell array device were used to toggle between different reagent channels, and a solenoid valve located at the downstream of the microwell array device was used to control the on/off of the reagent flow. The microwell array device is thus constantly being pressurized during incubation steps which help prevent the device from drying and suppress bubble formation. A microfluidic flow cell which traps bubbles came from upstream is connected in-serial immediate upstream of the microwell array device to further prevent bubbles from entering the microwell array device. A water hammer arrestor consists of a half-filled cryotube was connected immediate downstream of the microwell array device and upstream of the on-off flow switch valve to buffer the hydraulic shock produced by the on-off switch valve which can cause bead loss. The automated scanning system consists of laser light source, motorized stage, shuttle, and filter wheel, an inverted microscope, and a camera. An optically transparent mechanical support (glass slide) was attached to the bottom surface of the microwell array device to prevent sagging which facilitates imaging. Both the reagent delivery system and the scanning system are controlled by a C++ program.

### Full Single-Cell RNA Sequencing and Imaging Work Flow

[0156] An an embodiment, full single-cell RNA sequencing and imaging work flow may be as follows. A microwell array device is filled and flushed with TBS buffer. Single-cell suspension is then loaded into the device. The device is scanned under a microscope to obtain imaging phenotype and location of each individual cell in the device. Optically barcoded mRNA capture beads are then loaded into the device. Lysis buffer and oil are flowed into the device sequentially to trigger cell lysis and physically isolate the microwells from each other allowing mRNA from cells in different microwells to be captured by their respective co-localized beads. After the mRNA capture step, captured mRNA molecules are reverse transcribed which coverts mRNA into double-stranded DNA-RNA duplex resulting in the barcoding of cDNA. Any unused single-stranded capture primers on bead surface are removed by exonuclease I digestion. The device is then subject to twelve rounds of sequential FISH to read out the optical barcode sequence of each bead and their locations in the device. So far, all the reactions including cell lysis, mRNA capture, reverse transcription, exonuclease I digestion, and optical demultiplexing are performed on the device which allows the linking between each cell's imaging phenotype and optical barcode sequence of the bead that resides in the same well with the cell. After the optical demultiplexing step, all beads are extracted from the device. Tube-based PCR reactions are used to pre-amplify bead-bound cDNA molecules. In the case where the number of cells in the device is greater than the optical barcoding capacity enabled by the current 4096 unique optical sequences, the microwell array is cut into multiple pieces before the beads were extracted and processed in separate tubes in parallel. Each piece contains a number of cells within the optical barcoding capacity of the current 4096 unique optical sequences. By doing so, the optical barcoding capacity gains a n fold increase where n is the number of pieces the full device is cut into. The amplified cDNA copies are released into the liquid phase and further amplified into sequencing library and sequenced by commercially-available kit (Nextera XT, Illumina) and sequencers (NextSeq, Illumina). The raw fastq files generated by sequencers are processed to generate a digital expression matrix where each column represents the expression profile of a cell and each row represents the expression level of a gene. The look-up table generated in the bead synthesis step are then used to further link each cell's imaging phenotype to sequencing barcode sequence of the bead that resided in the same well with the cell and the associated mRNA expression profile.

### Mixed Species

[0157] Performance of the technique was evaluated by an experiment using two cell lines of distinct species (human U87 and mouse 3T3). Each of the two cell lines were stained with a dye with different emission wavelength. The two cell lines were then mixed in approximately equal proportion and loaded into a microwell array device followed by the full work flow described above. The imaging phenotypes obtained in this experiment include live stain intensity, cell size and morphology.

### Sequencing Data Quality

[0158] FIGS. 18A-E show sequencing data quality based on two major metrics for single-cell sequencing data quality: purity and molecular capture efficiency. In the mixed species experiment on human U87 and mouse 3T3, an average purity of 98% was observed, and an average molecular capture efficiency of 2452 genes/6224 molecules was detected per cell.

### Linking Accuracy

[0159] Since the two cell lines are from different species (human and mouse) that have different genomes, the species identity of each cell was determined based on the genome that majority of its mRNA molecules was mapped to. In addition, cells from different species were live stained with different dyes. Therefore, the species identity of each cell was independently determined based on the imaging data. The linking accuracy is defined as the percentage of cells having consistent species calls based on both sequencing and imaging data. A linking accuracy of 90% was demonstrated in this initial proof-of-concept experiment.

### Single-Stranded Ligation and Detached Oligonucleotides

[0160] Optically barcoded mRNA capture beads are generated by modifying sequence barcoded mRNA capture beads. These beads contain oligonucleotides with a universal primer sequence on the 5′-end, barcode sequences in the middle, and oligo(dT) on the 3′-end for mRNA capture. DNA-replicating enzymes, such as DNA polymerase, are used to attach the optical barcode oligonucleotides to the 3′-end of a subset of mRNA capture oligos on the beads. In addition, DNA-replicating enzymes, such as DNA polymerase, are used to generate sequencing libraries for identifying the barcode sequences attached to each bead. Exposure of the mRNA capture beads to enzymes that replicate DNA in a template-directed fashion prior to conducting single-cell RNA-Seq may be disadvantageous. This may be due to these enzymes causing mRNA capture oligonucleotides and optical barcode oligonucleotides to serve as primers and templates for each other, generating “primer-dimers” on the surface of the beads. This may reduce the concentration of mRNA capture oligonucleotides on the bead that is available for hybridization to mRNA and cDNA synthesis in single-cell RNA-Seq.

[0161] In an aspect, the potential problems noted above may be resolved by avoiding exposure of the beads to DNA-replicating enzymes when modifying the oligonucleotides on the bead and generating sequencing libraries for identifying the barcode sequences on each bead. In this aspect, a single-stranded ligation reaction facilitated by a DNA ligase, rather than primer extension facilitated by DNA polymerase is used to attach the optical barcode oligonucleotides to a subset of mRNA capture oligonucleotides on the bead.

[0162] In an aspect, sequencing libraries containing the barcode sequences of each bead are generated by taking advantage of the fact that a small number of oligonucleotides detach from the beads at a slow rate, making them available in solution. By allowing this to occur and isolating these detached oligonucleotides from the supernatant of the beads, a sequencing library using DNA polymerase can be generated, but without exposing the beads directly to this enzyme.

[0163] Single-stranded ligation and use of detached oligonucleotides permit synthesis of optically barcoded mRNA capture beads, decoding of the barcode sequences, and efficient single-cell RNA-Seq using those beads.

[0164] The challenge noted above could be applicable to other areas. While the mRNA capture beads modified with optical barcode sequences, it may be desireable to modify the mRNA capture beads for applications such as targeted capture of specific gene sequences. For example, one could envision modifying a subset of oligonucleotides on the mRNA capture beads using the methods described above to facilitate targeted enrichment of a specific gene sequence from individual cells while still allowing unbiased profiling of the mRNA from those cells using the remaining oligo(dT) capture sequence. Specific cases include targeted enrichment of the T cell receptor repertoire or antibody repertoire from immune populations with simultaneous, unbiased mRNA profiling of the same individual cells.

### Kits

[0165] In another aspect, the disclosure provides for a kit comprising, consisting essentially of, or consisting of any of probes, beads, and regents disclosed herein. In an aspect, the kit includes any of the combination of probes, beads, and regents disclosed in the Figures herein. In another aspect, the kit provides for probes, beads, and regents applied in a manner that is consistent with the methodology of the examples and figures. In another aspect, the kit provides instructions or guidance regarding the use of the compositions, probes, devices, systems or methods described herein.

[0166] In an aspect, the kit includes instructions describing the methodology described herein.

[0167] The following examples serve to illustrate certain aspects of the disclosure and are not intended to limit the disclosure.

### Examples

[0168] The invention is illustrated herein by the experiments described by the following examples, which should not be construed as limiting. The contents of all references, pending patent applications and published patents, cited throughout this application are hereby expressly incorporated by reference. Those skilled in the art will understand that this invention may be embodied in many different forms and should not be construed as limited to the embodiments set forth herein. Rather, these embodiments are provided so that this disclosure will fully convey the invention to those skilled in the art. Many modifications and other embodiments of the invention will come to mind in one skilled in the art to which this invention pertains having the benefit of the teachings presented in the foregoing description. Although specific terms are employed, they are used as in the art unless otherwise indicated.

### Example 1

[0169] Generation of Optically Barcoded mRNA Capture Beads for Optical Demultiplexing by Multi-Color Fluorescence Imaging for Single Cell RNA-Seq

[0170] N-succinimide-coated Sepharose beads with a mean diameter of ˜30 μm were obtained from GE Healthcare in isopropanol. The beads were washed three times with water by centrifugation and split into 125 different tubes. The beads were then re-suspended in a reaction mixture with a final concentration of 100 mM sodium borate (pH 8.5) along with three differently-labeled streptavidin proteins (streptavidin-AlexaFluor 488, streptavidin-AlexaFluor 546, and Streptavidin-AlexaFluor 647 from Life Technologies). For each of the 125 reaction mixtures, the three proteins were added at one of 5 concentrations such that each of the 125 reaction mixtures had one of 5\hat{ }3=125 unique combinations of labels and label intensities. The reaction was incubated at room temperature for one hour on a rotisserie to allow the labeled streptavidins to covalently react with the beads, form amide bonds. The beads were then washed five times in 50 mM Tris-HCl pH 8, 50 mM NaCl, and 0.1% Tween-20 before using to completely quench any remaining reactive groups on the beads. Each of the 125 uniquely labeled sets of beads were then incubated with a uniquely barcoded, 5′-biotinylated oligonucleotide.

[0171] The oligonucleotides had a universal adapter sequence on the 5′-end to facilitate amplification, a barcode sequence, and oligo(dT) on the 3′-end to facilitate mRNA capture. The oligonucleotides became bound to the beads through the biotin-streptavidin interaction, resulting in beads that could be identified by fluorescence microscopy based on their unique configuration of fluorescent labels to harbor a specific nucleic acid barcode sequence.

Generation of Optically Barcoded mRNA Capture Beads for Optical Demultiplexing by Sequential Fluorescence Hybridization for Single Cell RNA-Seq

[0172] 2.4 million beads aminated polystyrene beads (Custom Primer Support 200 Amino, GE) were reacted with an 8% solution of glutaraldehyde in Cyanoborohydride Coupling Buffer (Sigma) for six hours a room temperature. After washing the beads in phosphate buffered saline (PBS), the beads were divided evenly into each of 32 tubes. To each tube, 62.5 pmol of a unique 5′-aminated oligonucleotide were added containing an adapter sequence, a unique capture barcode sequence, and a linker sequence. In addition, zero or more 5′-aminated oligonucleotides were added from a set of five, each of which contains a unique optical barcode sequence and a linker sequence. The constellation of oligonucleotides on the bead surface forms a binary code. For example, if there are five oligonucleotides in a set, and the first, third, and fourth oligonucleotides are present on the bead, then the code could be in an aspect, 10110. However, there will also be a bead in the set with the code 00000, where none of the oligonucleotides are present. This also provides a signal, a bead that does not fluoresce when exposed to any of the probes

[0173] 2.5 pmol of each optical barcode oligonucleotide was further added. Each capture barcode sequence is associated with a unique set of optical barcode sequences. In this embodiment, there are 32 capture barcode sequences and 25=32 possible combinations of optical barcode configurations added in the first round of synthesis. The 5′-aminated oligonucleotides were reacted with the aldehyde-conjugated beads in Cyanoborohydride Coupling buffer for 12 hours at room temperature. The reaction was then quenched by the reaction by adding 1 M Tris-HCl to each well. The beads were then washed in PBS.

[0174] In a second barcode synthesis, the 32 reactions from the first round were pooled and then re-distributed into each of 128 tubes. To each tube, 150 pmol of a unique oligonucleotide was added containing a linker sequence complementary to that in the capture barcode oligonucleotides already attached to the beads, a second capture barcode sequence, a random sequence (for unique molecular identification), and a poly(A) sequence. In addition, zero or more oligonucleotides from a set of seven were added, each of which contains a unique optical barcode sequence and a linker sequence complementary to that in the optical barcode oligonucleotides already attached to the beads. 20 pmol of each optical barcode oligonucleotide. Each capture barcode sequence is associated with a unique set of optical barcode sequences. There are 128 capture barcode sequences and 27=128 possible combinations of optical barcode configurations added in the second round of synthesis. In combination with the first round of synthesis, the second round of synthesis results in a set of 32×128=4,096 uniquely barcoded beads with both unique capture and optical barcodes attached. The second round oligonucleotides was hybridized to the oligonucleotides attached in the first round in Buffer 2 (New England BioLabs) with 1% tween-20 (Sigma) at 50° C. for 20 minutes and at room temperature for 12 hours. The beads were then washed and then copied the second round oligonucleotides onto the 3′-end of the first round oligonucleotides by primer extension with Klenow Large Fragment DNA Polymerase (New England BioLabs) at room temperature for 2 hours. The primer extension reaction was quenched with EDTA followed by sodium hydroxide. The beads from all 128 reactions were then pooled and washed them extensively in sodium hydroxide and Wash Buffer (10 mM Tris pH 8, 1 mM EDTA, 0.01% tween-20).

### Fabrication of a PDMS Microwell Array Device

[0175] Microfabricated arrays of cylindrical pillars in photoresist on a silicon wafer were obtained from FlowJEM. The pillars were 50 microns in diameter and 50 microns tall. A second wafer contained a relief pattern of a flow channel. A 1:10 mixture of liquid polydimethylsiloxane (PDMS) base and curing agent (Sylgard 184, Dow-Corning) was poured on each wafer. A glass microscope slide was pressed onto the uncured liquid PDMS that had been poured on the wafer containing cylindrical pillars, forming a thin layer of PDMS between the wafer and the glass slide. Both wafers with liquid PDMS were then placed in an oven to cure at 90° C. overnight. The cured, solidified PDMS were then peeled from both wafers resulting in a thin microwell array on the glass slide and a PDMS flow channel. After using a punch to insert inlet and outlet holes on either end of the flow channel, air plasma was used to bond the flow channel over the microwell array. The resulting microwell array flow cell device was then used for single cell RNA-Seq and optical demultiplexing.

Single Cell RNA-Seq Library Generation in a Microwell Array Device using In Vitro Transcription

[0176] Prior to the experiment, the device was flushed with 0.1% Tween-20 and incubated for several hours to hydrate the microwells, which were subsequently washed with PBS. Cell suspensions were counted using the Countess automated cell counter (Life Technologies). A suspension of cells in PBS mixed with Calcein AM (live stain) was flowed into the device and incubated for five minutes. Cells were deposited in the microwells by gravity. After thoroughly removing any excess cells with PBS, a suspension of barcoded capture beads that had been pre-counted by microscopy was introduced in PBS and allowed to load under gravity for five minutes. Excess beads were thoroughly removed with PBS and the flow cell was incubated on ice. A lysis buffer containing 0.08% Triton X-100 supplemented with SUPERaseIN (Life Technologies) was flowed under ice-cold conditions immediately followed by fluorinert oil (Sigma) to seal the device. After two cycles of freeze-thaw at −80° C. to enhance cell lysis, the device was incubated at room temperature for 60 minutes for mRNA capture. After one hour of incubation for mRNA capture, the device was unsealed by rapid removal of the fluorinert oil with 20 mM Tris-HCl pH 8 containing 1% Triton X-100 and SUPERaseIN followed by thorough washing of the device with 20 mM Tris-HCl pH 8, 50 mM NaCl, and 0.1% Tween-20.

[0177] The mRNA captured on the beads was reverse transcribed using ProtoScript II Reverse Transcriptase (New England BioLabs) for two hours at 42° C. in 1× ProtoScript Reverse Transcriptase Buffer supplemented with 10 mM DTT, 0.5 mM dNTPs, 0.1% Tween-20, and SUPERaseIN. The reaction mixture was then removed with 20 mM Tris-HCl pH 8, 50 mM NaCl, and 0.1% Tween-20. Second strand synthesis was carried out using the MessageAmp II aRNA amplification kit (Ambion) according to the manufacturer's instructions. This involves a reaction mixture with DNA polymerase and RNaseH that is incubated for two hours at 16° C. After removing the second strand reaction mixture with 20 mM Tris-HCl pH 8, 50 mM NaCl, and 0.1% Tween-20, in vitro transcription (IVT) was carried out using reagents in the MessageAmp II aRNA amplification kit (Ambion) including T7 RNA polymerase according to the manufacturer's instructions for 13 hours at 37° C. The reaction linearly amplified the double-stranded cDNA libraries on the beads, eluting pools of barcoded aRNA into the flow channel which was subsequently removed using a pipette and purified using an RNA Clean & Concentrator Column (Zymo). aRNA was then reverse transcribed using uniquely barcoded random hexamer primers using PrimeScript Reverse Transcriptase (Clontech) supplemented with 0.5 mM dNTPs, 10 mM DTT, 1× PrimeScript Buffer, and 0.1 U/uL SUPERaseIN. The reaction proceeded for 10 minutes at 25° C. and two hours at 42° C. The RNA-cDNA hybrid product was purified twice using 0.65× Ampure XP beads (Beckman). The resulting cDNA libraries were then enriched by PCR using Phusion High Fidelity DNA polymerase (New England BioLabs) using the Illumina RP1 and RPI primers. The resulting PCR product was then purified on a 1.5% agarose gel, extracted using a Gel Extraction Kit (Qiagen), purified using 0.65× Ampure XP beads (Beckman), and sequenced on a NextSeq 500 sequencer (Illumina).

Single Cell RNA-Seq Library Generation in a Microwell Array Device using Template-Switching

[0178] Cells and mRNA capture beads were loaded into the microwell array device as described above. The device was then placed on a computerized temperature and fluidic control system for automated single cell library production. The system consists of a manually controlled pressurization system, software, an electronic six-port rotary selector valve (Rheodyne), and a thermoelectric heater-cooler module (TE Technology). After cooling the system to 4° C., a lysis solution comprised of TCL Buffer (Qiagen) and 1% 2-mercaptoethanol was introduced to the device, which was rapidly and automatically sealed with fluorinert (Sigma). After removing the oil and unsealing the microwells, a reverse transcription reaction mixture comprised of 1× Maxima RT Buffer, 1 mM dNTPs, 1 U/uL SUPERaseIN, 2.5 uM template-switching oligonucleotide, 0.1% Tween-20, and 10 U/uL Maxima H-Reverse Transcriptase (ThermoFisher) was introduced and incubated for 30 minutes at room temperature followed by 90 minutes at 42° C.

[0179] After removing the reverse transcription reaction mixture, the beads were removed from the microwells by sonication, concentrated by centrifugation and incubated for 30 minutes at 37° C. with Exonuclease I in 1× Exonuclease I Buffer (New England BioLabs). The beads were then washed in 10 mM Tris-HCl pH 8, 1 mM EDTA, and 0.5% sodium dodecyl sulfate (SDS) followed by 10 mM Tris-HCl pH 8, 1 mM EDTA, and 0.01% Tween-20. The beads were then re-suspended in a PCR reaction mixture containing 1× HiFi Hot Start Ready Mix (Kappa) and 1 uM PCR primer and thermocycled to amplify a full-length, double-stranded, pooled cDNA library. The PCR product was purified with 0.6× Ampure XP beads (Beckman). The library was then fragmented and a sequencing adapter introduced using the Nextera XT library preparation kit (Illumina) according to the manufacturer's instructions. Finally, the sequencing library was enriched by PCR using a reverse PCR primer from the Nextera XT kit and a custom forward PCR primer along with amplification reagents from the Nextera XT kit used according to the manufacturer's instructions. The resulting PCR product was purified with 0.6× Ampure XP beads (Beckman) and sequenced on a NextSeq 500 sequencer (Illumina).

Optical Demultiplexing of Barcoded mRNA Capture Beads

[0180] Following cDNA synthesis on the surface of optically barcoded capture beads, the microwell array device was transferred to an epifluorescence microscope system. The microscope system contains an inverted microscope frame (Ti-U, Nikon), an electron-multiplied charge coupled device (EM-CCD) camera (iXon, Andor), a 20×0.75 NA air objective lens (Nikon), a three-axis motorized stage (ASI), a 140 mW 637 nm optically pumped semiconductor laser (OBIS, Coherent), and custom optics for coupling the laser beam into the microscope. The custom optical path includes an engineered diffusor (Thorlabs) and electronic phase scrambling device for flattening the illumination field. An automated, computer-controlled fluidics system is attached the microscope system and contains two, ten-channel rotary selector valves (Rheodyne). A single computer program controls the fluidics system, laser shutter, camera, and microscope stage. Each of twelve, Cy5-labeled optical barcode probes was loaded into the channels of the fluidics system. The optical barcode probes were each complementary to one of the optical barcode oligonucleotides attached the beads as described above. In addition, a wash buffer (20 mM Tris-HCl pH 8, 50 mM NaCl, and 0.1% Tween-20) and a denaturing solution (100 mM NaOH) were loaded into independent channels of the fluidics system. The first of twelve optical barcode probes was flowed into the flow cell, incubated at room temperature for ten minutes, and washed out with wash buffer. After washing, the microscope automatically scanned and imaged the entire microwell array and identifies the beads in each microwell that are fluorescently labeled with the first optical barcode probe by hybridization, indicating the presence of the first optical barcode sequence. The denaturing solution was then introduced to the flow cell which causes the first optical barcode probe to dissociate from the beads and exit the flow cell. After washing with wash buffer, the process was repeated for all of the remaining optical barcode probes. At conclusion, the configuration of optical barcode sequences attached to each bead can be inferred from the series of twelve fluorescence images. Because each unique configuration of optical barcode sequences corresponds to a specific capture barcode sequence associated with the cDNA that is also attached to each bead, the capture barcode sequence for each individual cell can be identified (see, for example, FIG. 1A and FIG. 1B). This allows a direct association between imaging information acquired from the cells, the capture barcode associated with the cDNA of the at cell that is read out on the sequencer, and therefore the transcriptome of that cell all through identification of the corresponding optical barcode.

### Example 2

### Fabrication PDMS Microwell Arrays for Single Cell RNA Printing

[0181] Silicon wafer masters (˜4 in) with cylindrical pillars (diameter 50 micron; height 30 micron) for photolithography were obtained from Stanford Microfluidics Foundry and were subsequently exposed to 1H, 1H,2H,2H-perfluorooctyltrichlorosilane (Alfa Aesar) vapor under vacuum for ˜30 minutes to avoid curing of the PDMS on the wafer. PDMS (Sylgard 184, Dow Corning) was thoroughly mixed 10:1 (base:curing agent) and degassed under house vacuum for 2 hours. ˜15 g of degassed PDMS was poured onto the 4 in silicon wafer master and allowed to cure overnight at ˜90° C. This slab with microwells was then gently peeled off from the master and used to construct PDMS microreactor flow cells.

### Surface Chemistry on Glass Coverslip

[0182] Vista Vision Microscope cover glass (22×50×0.16 mm) was plasma sterilized (Harrick Plasma) for ˜5 mins, and immediately immersed in 10% acetic acid (pH 3.5) ethanol solution containing 0.5% trimethoxysilanealdehyde (United Chemical Technologies), and incubated for 15 mins. The cover glass was then washed with ethanol, air-dried and heat cured at 90° C. for 10 mins. A 2.5 uM solution of 5′-aminated-LNA-oligo(dT) (Exiqon) in cyanoborohyride coupling buffer (Sigma) supplemented with 1M NaCl was added on the aldehyde surface of the cover glass. The cover glass was incubated for 3 hours at room temperature inside a humid chamber, and then washed with DI water. The aldehyde surface was then incubated in 10% ethanolamine in cyanoborohydride coupling buffer for 30 mins to quench the unreacted aldehydes.

### Construction of the Flowcell

[0183] A rectangular slab (3.5×1.5×0.1 cm) of PDMS containing the microwell array in the center was cut and a double-sided adhesive tape (˜120 micron thickness, Grace BioLabs) was adhered to the flat side of the PDMS slab that contained the microwells. The tape was cut in an elongated hexagonal shape, which formed the microchannel in the flowcell. The other side of the tape was pasted on the LNA coated cover glass to build the microfluidic device. Two holes were punched at the two end of the microchannel with a biopsy punch, which acted as the inlet and outlet of the device and tubing were attached to allow liquid flow. The periphery of the PDMS slab was sealed on to the cover glass using epoxy glue.

Experimental Procedure for Single Cell mRNA printing on glass

[0184] A suspension of U87 cells in PBS was flowed in to the device and loaded into the microwells by gravity (kept upside down) for 5 mins at room temperature. After washing with PBS buffer supplemented with SUPERaseIN (Ambion), the microwells were sealed using an automated mechanical device by placing the flow cell upside down on a screw mounted on a motorized z-stage (ASI) so that the top PDMS slab containing the microwells was pressed against the glass bottom. After sealing the wells mechanically, the seal was retained by hermetic sealing to trap the single cell lysate within a single microwell. The cells were lysed by freeze-thaw. Once the cells lysed, the mRNAs were captured on the LNA surface by hybridization of the 3′-poly A tail of the mRNA to the LNA-oligo(dT) during a 60 minute incubation. The microwells were then unsealed and the flow cell was immediately and vigorously washed with the Wash Buffer (20 mM Tris pH 8.0, 50 mM NaCl, 0.1% Tween-20), supplemented with SUPERaseIN (FIG. 2A). The flowcell was then incubated with TURBO DNase (Ambion) in TURBO DNase buffer, supplemented with 0.1% Tween-20 and SUPERaseIN for 30 mins at 37° C. to digest any residual genomic DNA. The mRNA captured on the LNA surface was reverse transcribed using M-MuLV Reverse Transcriptase (New England Biolabs) for 2 hours at 42° C. in 1× M-MuLV Reverse Transcriptase buffer, supplemented with 10 mM DTT, 5 mM dNTPs, 0.1% Tween-20 and SUPERaseIN. After reverse transcription the double stranded RNA-cDNA hybrids were stained with 10 nM SYTOX Orange dye (Invitrogen), an intercalator that is selective for double-stranded DNA, and incubated for 5 mins prior to imaging.

[0185] The epifluorescence imaging system was constructed on an inverted Nikon Eclipse Ti-U microscope with 20×, 0.75 NA air objective (Plan Apo 2, Nikon). SYTOX

[0186] Orange was excited using a 532 nm diode-pumped solid state laser (Dragon Lasers), and the fluorescence was collected and imaged onto an electron multiplying charge coupled device (EMCCD) camera (iXON3, Andor Technologies). The images were acquired with 0.5 s exposure time (controlled by external shutter) at 1 MHz digitization (with no EM gain). Automated scanning of the surface (motorized X-Y stage, ASI), image acquisition, and illumination were controlled with custom software written in C/C++. The images were analyzed using Image J software.

### Microfluidic Device for Single Cell RNA-Seq

[0187] For the single cell RNA-Seq experiment a monolithic PDMS was designated based multi-channel device, by fabricating each channel with a microwell array. Two key soft lithography techniques were used to fabricate this device. First, instead of using silicon wafer master directly for fabricating the microwell array as done in the case of RNA printing device, we generated a secondary master made out of PDMS. This was done because the aspect ratio of the micropillars results in a relatively fragile silicon master. It was found that the PDMS master to be more durable. Second, instead of using a double-sided adhesive tape for the device assembly, the bottom and the top of the device were bonded together by partial curing. This provided us with more durable and reliable partitions between the individual channels of our device than could be generated using tape. For the multi-lane microfluidic device, two different silicon wafer masters were fabricated, one for the top and other for the bottom containing the array of microwells. Masters for soft lithography were generated from 4-inch silicon test wafers (University Wafer) coated with SU-8 2005 (MicroChem) photoresist. The wafer master for the bottom of the device contained five arrays of cylindrical pillars (diameter 50 micron; height 50 micron). The wafer was then fluorosilanized as described above. To avoid repeated use of the silicon wafer, we fabricated secondary masters in PDMS as follows. 40 g of degassed PDMS 10:1 (base:curing agent) was poured and cured on the wafer, and then peeled off and cut into a rectangular slab. The surface containing an array of microwells was oxidized in plasma chamber (Harrick Plasma) for ˜2 mins and immediately fluorosilanized. Using this microwell-containing slab as a master, ˜10 g of degassed PDMS was cured on it and peeled off. This new PDMS slab containing array of pillars is an exact replica of the silicon wafer, and is fluorosilanized and served as a secondary master for soft lithography for microfabrication of the bottom part of the microfluidic flowcell device. ˜2 g of degassed PDMS 10:1 (base: curing agent) was poured on a plasma cleaned glass slide and the secondary master with pillar array was placed gently with pillars immersed into the liquid PDMS. The slide, PDMS and master (on top) was degassed for ˜5 mins and then cured hard at 90° C. for 2 hours. After curing, the master is peeled off and a thin layer of PDMS is bonded to the glass slide with 5 lane arrays of microwells.

[0188] A second silicon wafer master was constructed containing five longitudinal ridges (with a height of 100 microns) with rounded ends on which ˜30 g of degassed PDMS 15:1 (base: curing agent) was poured and allowed to cure partially at 60° C. for 90 mins. The partially cured PDMS was cut into a slab, holes were punched at either end of each channel, and the slab was placed gently on the top of the glass slide containing the microwell array in such a way that the longitudinal grooves were aligned over each of the five microwell arrays. The slide assembly was then incubated at 90° C. overnight to form a single monolithic PDMS structure as shown in FIG. 5A.

Synthesis of Uniquely Barcoded Beads for mRNA Capture

[0189] N-succinimide-coated Sepharose beads with a mean diameter of ˜30 μm were obtained from GE Healthcare in isopropanol. The beads were washed three times with water by centrifugation and re-suspended in a reaction mixture with a final concentration of 100 mM sodium borate (pH 8.5) and ˜0.8 mg/mL streptavidin (streptavidin from New England BioLabs was spiked with ˜2% AlexaFluor 647-labeled streptavidin from Life Technologies). The reaction was incubated at room temperature for one hour on a rotisserie to allow the streptavidin to covalently attach to the beads. The beads were then washed five times in Wash Buffer and incubated in 1 Wash Buffer for 30 minutes before using to completely quench any remaining reactive groups on the beads.

[0190] A dual-biotinylated oligonucleotide containing both the T7 promoter sequence and a partial Illumina adapter sequence (Table 1) were annealed to each of 96 oligonucleotides (Table 2) that are complementary to the partial Illumina adapter sequence on the 3′-end and contain a unique barcode and universal anchor sequence on the 5′-end (FIGS. 3A and 3B). Table 1 describes a list of oligonucleotides used for barcoding and library preparation in additional to list of cell-identifying barcodes in Table 2 for Experiment 1.

TABLE 1

| Oligonucleotide Name | Oligonucleotide Sequence | SEQ ID NO: |
|---|---|---|
| Bead Capture Oligo (5′-dual | AGGTAAGGTAATACGACTCACTATAGGG | 9464 |
| biotinylated) | GTTCAGAGTTCTACAGTCCGACGATC | |
| RT1 (Reverse Transcription | GCCTTGGCACCCGAGAATTCCANNNNNN | 9465 |
| Primer for Lane 1) | NNCGTGATNNNNNN | |
| RT2 (Reverse Transcription | GCCTTGGCACCCGAGAATTCCANNNNNN | 9466 |
| Primer for Lane 2) | NNACATCGNNNNNN | |
| RT3 (Reverse Transcription | GCCTTGGCACCCGAGAATTCCANNNNNN | 9467 |
| Primer for Lane 3) | NNGCCTAANNNNNN | |
| RT4 (Reverse Transcription | GCCTTGGCACCCGAGAATTCCANNNNNN | 9468 |
| Primer for Lane 4) | NNTGGTCANNNNNN | |
| RT5 (Reverse Transcription | GCCTTGGCACCCGAGAATTCCANNNNNN | 9469 |
| Primer for Lane 5) | NNCACTGTNNNNNN | |
| RP1 (PCR Primer 1) | AATGATACGGCGACCACCGAGATCTACA | 9470 |
| | CGTTCAGAGTTCTACAGTCCGA | |
| RPI1 (PCR Primer 2) | CAAGCAGAAGACGGCATACGAGATCGTG | 9471 |
| | ATGTGACTGGAGTTCCTTGGCACCCGAG | |
| | AATTCCA | |

TABLE 2

| Oligonucleotide | | SEQ ID |
|---|---|---|
| Name | Oligonucleotide Sequence | NO: |
| FBC_Oligo1 | CAGGTCAACCAGAGAGATCGTCGGACTGTAGAACTCTGAAC | 9472 |
| FBC_Oligo2 | CAGGTCAAAGTACGCGATCGTCGGACTGTAGAACTCTGAAC | 9473 |
| FBC_Oligo3 | CAGGTCGTTTGGCATGATCGTCGGACTGTAGAACTCTGAAC | 9474 |
| FBC_Oligo4 | CAGGTCAAGTGAGGTGATCGTCGGACTGTAGAACTCTGAAC | 9475 |
| FBC_Oligo5 | CAGGTCACGTTAGCTGATCGTCGGACTGTAGAACTCTGAAC | 9476 |
| FBC_Oligo6 | CAGGTCGTGCTAGAGGATCGTCGGACTGTAGAACTCTGAAC | 9477 |
| FBC_Oligo7 | CAGGTCGTCCTGTGTGATCGTCGGACTGTAGAACTCTGAAC | 9478 |
| FBC_Oligo8 | CAGGTCTCTACGGCAGATCGTCGGACTGTAGAACTCTGAAC | 9479 |
| FBC_Oligo9 | CAGGTCACAGGGCTTGATCGTCGGACTGTAGAACTCTGAAC | 9480 |
| FBC_Oligo10 | CAGGTCGTGCGTTATGATCGTCGGACTGTAGAACTCTGAAC | 9481 |
| FBC_Oligo11 | CAGGTCGGGTAAGTAGATCGTCGGACTGTAGAACTCTGAAC | 9482 |
| FBC_Oligo12 | CAGGTCTCCCTTAGGGATCGTCGGACTGTAGAACTCTGAAC | 9483 |
| FBC_Oligo13 | CAGGTCCAAGTTGGTGATCGTCGGACTGTAGAACTCTGAAC | 9484 |
| FBC_Oligo14 | CAGGTCTTCTCACTCGATCGTCGGACTGTAGAACTCTGAAC | 9485 |
| FBC_Oligo15 | CAGGTCTCCCACTCTGATCGTCGGACTGTAGAACTCTGAAC | 9486 |
| FBC_Oligo16 | CAGGTCCGGTATACCGATCGTCGGACTGTAGAACTCTGAAC | 9487 |
| FBC_Oligo17 | CAGGTCAGGCATGTGGATCGTCGGACTGTAGAACTCTGAAC | 9488 |
| FBC_Oligo18 | CAGGTCCCCAGATTGGATCGTCGGACTGTAGAACTCTGAAC | 9489 |
| FBC_Oligo19 | CAGGTCTTCCCTTGAGATCGTCGGACTGTAGAACTCTGAAC | 9490 |
| FBC_Oligo20 | CAGGTCGTTGTACGAGATCGTCGGACTGTAGAACTCTGAAC | 9491 |
| FBC_Oligo21 | CAGGTCTGCTTGCAGGATCGTCGGACTGTAGAACTCTGAAC | 9492 |
| FBC_Oligo22 | CAGGTCGGCCTCATTGATCGTCGGACTGTAGAACTCTGAAC | 9493 |
| FBC_Oligo23 | CAGGTCAACAGCCTAGATCGTCGGACTGTAGAACTCTGAAC | 9494 |
| FBC_Oligo24 | CAGGTCGATGCAATGGATCGTCGGACTGTAGAACTCTGAAC | 9495 |
| FBC_Oligo25 | CAGGTCGAAGGAACGGATCGTCGGACTGTAGAACTCTGAAC | 9496 |
| FBC_Oligo26 | CAGGTCCAGCCACTTGATCGTCGGACTGTAGAACTCTGAAC | 9497 |
| FBC_Oligo27 | CAGGTCCTCTGCTTCGATCGTCGGACTGTAGAACTCTGAAC | 9498 |
| FBC_Oligo28 | CAGGTCGGCTTATGAGATCGTCGGACTGTAGAACTCTGAAC | 9499 |
| FBC_Oligo29 | CAGGTCCTAGTCCTCGATCGTCGGACTGTAGAACTCTGAAC | 9500 |
| FBC_Oligo30 | CAGGTCCTAGAGGAGGATCGTCGGACTGTAGAACTCTGAAC | 9501 |
| FBC_Oligo31 | CAGGTCAGCTTTACCGATCGTCGGACTGTAGAACTCTGAAC | 9502 |
| FBC_Oligo32 | CAGGTCGTCCATGAAGATCGTCGGACTGTAGAACTCTGAAC | 9503 |
| FBC_Oligo33 | CAGGTCCTCGAACCTGATCGTCGGACTGTAGAACTCTGAAC | 9504 |
| FBC_Oligo34 | CAGGTCCATTGTACGGATCGTCGGACTGTAGAACTCTGAAC | 9505 |
| FBC_Oligo35 | CAGGTCTTGAACGCTGATCGTCGGACTGTAGAACTCTGAAC | 9506 |
| FBC_Oligo36 | CAGGTCTACGTCATGGATCGTCGGACTGTAGAACTCTGAAC | 9507 |
| FBC_Oligo37 | CAGGTCAAGCCGTTAGATCGTCGGACTGTAGAACTCTGAAC | 9508 |
| FBC_Oligo38 | CAGGTCCGGACGTATGATCGTCGGACTGTAGAACTCTGAAC | 9509 |
| FBC_Oligo39 | CAGGTCTCGTTACCGGATCGTCGGACTGTAGAACTCTGAAC | 9510 |
| FBC_Oligo40 | CAGGTCATCCCCCATGATCGTCGGACTGTAGAACTCTGAAC | 9511 |
| FBC_Oligo41 | CAGGTCCAGACGATTGATCGTCGGACTGTAGAACTCTGAAC | 9512 |
| FBC_Oligo42 | CAGGTCATCGATCCCGATCGTCGGACTGTAGAACTCTGAAC | 9513 |
| FBC_Oligo43 | CAGGTCCCTGAGGATGATCGTCGGACTGTAGAACTCTGAAC | 9514 |
| FBC_Oligo44 | CAGGTCAGCTCTTTGGATCGTCGGACTGTAGAACTCTGAAC | 9515 |
| FBC_Oligo45 | CAGGTCGGAATACGGGATCGTCGGACTGTAGAACTCTGAAC | 9516 |
| FBC_Oligo46 | CAGGTCCTATCCTGGGATCGTCGGACTGTAGAACTCTGAAC | 9517 |
| FBC_Oligo47 | CAGGTCGGTTGTAGTGATCGTCGGACTGTAGAACTCTGAAC | 9518 |
| FBC_Oligo48 | CAGGTCGAACGTAGCGATCGTCGGACTGTAGAACTCTGAAC | 9519 |
| FBC_Oligo49 | CAGGTCGTCTATCGGATCGTCGGACTGTAGAACTCTGAAC | 9520 |
| FBC_Oligo50 | CAGGTCTACGAGTGGATCGTCGGACTGTAGAACTCTGAAC | 9521 |
| FBC_Oligo51 | CAGGTCTCATGTCGGATCGTCGGACTGTAGAACTCTGAAC | 9522 |
| FBC_Oligo52 | CAGGTCAAACACCCGATCGTCGGACTGTAGAACTCTGAAC | 9523 |
| FBC_Oligo53 | CAGGTCACTAGTCCGATCGTCGGACTGTAGAACTCTGAAC | 9524 |
| FBC_Oligo54 | CAGGTCCGAGGAATGATCGTCGGACTGTAGAACTCTGAAC | 9525 |
| FBC_Oligo55 | CAGGTCACAATGGCGATCGTCGGACTGTAGAACTCTGAAC | 9526 |
| FBC_Oligo56 | CAGGTCTAGGTCTCGATCGTCGGACTGTAGAACTCTGAAC | 9527 |
| FBC_Oligo57 | CAGGTCTCTGTGAGGATCGTCGGACTGTAGAACTCTGAAC | 9528 |
| FBC_Oligo58 | CAGGTCGGGATTGAGATCGTCGGACTGTAGAACTCTGAAC | 9529 |
| FBC_Oligo59 | CAGGTCAACTCTGGGATCGTCGGACTGTAGAACTCTGAAC | 9530 |
| FBC_Oligo60 | CAGGTCAAACGCGTGATCGTCGGACTGTAGAACTCTGAAC | 9531 |
| FBC_Oligo61 | CAGGTCTCCTACGAGATCGTCGGACTGTAGAACTCTGAAC | 9532 |
| FBC_Oligo62 | CAGGTCTAGCAGGTGATCGTCGGACTGTAGAACTCTGAAC | 9533 |
| FBC_Oligo63 | CAGGTCCCTGCATTGATCGTCGGACTGTAGAACTCTGAAC | 9534 |
| FBC_Oligo64 | CAGGTCGTGATGCAGATCGTCGGACTGTAGAACTCTGAAC | 9535 |
| FBC_Oligo65 | CAGGTCCGATTCAGGATCGTCGGACTGTAGAACTCTGAAC | 9536 |
| FBC_Oligo66 | CAGGTCAGGATGACGATCGTCGGACTGTAGAACTCTGAAC | 9537 |
| FBC_Oligo67 | CAGGTCAGGCCATAGATCGTCGGACTGTAGAACTCTGAAC | 9538 |
| FBC_Oligo68 | CAGGTCGCTTGCTTGATCGTCGGACTGTAGAACTCTGAAC | 9539 |
| FBC_Oligo69 | CAGGTCTCCCAAGTGATCGTCGGACTGTAGAACTCTGAAC | 9540 |
| FBC_Oligo70 | CAGGTCTCAAGGCAGATCGTCGGACTGTAGAACTCTGAAC | 9541 |
| FBC_Oligo71 | CAGGTCACGAGGTAGATCGTCGGACTGTAGAACTCTGAAC | 9542 |
| FBC_Oligo72 | CAGGTCGGAACGAAGATCGTCGGACTGTAGAACTCTGAAC | 9543 |
| FBC_Oligo73 | CAGGTCAATCCCAGGATCGTCGGACTGTAGAACTCTGAAC | 9544 |
| FBC_Oligo74 | CAGGTCCGATAAGGGATCGTCGGACTGTAGAACTCTGAAC | 9545 |
| FBC_Oligo75 | CAGGTCTATCGCGAGATCGTCGGACTGTAGAACTCTGAAC | 9546 |
| FBC_Oligo76 | CAGGTCCGCATAACGATCGTCGGACTGTAGAACTCTGAAC | 9547 |
| FBC_Oligo77 | CAGGTCGTGCAGTTGATCGTCGGACTGTAGAACTCTGAAC | 9548 |
| FBC_Oligo78 | CAGGTCAGAACGCTGATCGTCGGACTGTAGAACTCTGAAC | 9549 |
| FBC_Oligo79 | CAGGTCTAGAGGTCGATCGTCGGACTGTAGAACTCTGAAC | 9550 |
| FBC_Oligo80 | CAGGTCCTGTGATGGATCGTCGGACTGTAGAACTCTGAAC | 9551 |
| FBC_Oligo81 | CAGGTCTAGAGCCAGATCGTCGGACTGTAGAACTCTGAAC | 9552 |
| FBC_Oligo82 | CAGGTCCTTGATGCGATCGTCGGACTGTAGAACTCTGAAC | 9553 |
| FBC_Oligo83 | CAGGTCTTCGTGTCGATCGTCGGACTGTAGAACTCTGAAC | 9554 |
| FBC_Oligo84 | CAGGTCTATCTGCGGATCGTCGGACTGTAGAACTCTGAAC | 9555 |
| FBC_Oligo85 | CAGGTCTGGTAGGAGATCGTCGGACTGTAGAACTCTGAAC | 9556 |
| FBC_Oligo86 | CAGGTCCCTAGACAGATCGTCGGACTGTAGAACTCTGAAC | 9557 |
| FBC_Oligo87 | CAGGTCAGTCAACGGATCGTCGGACTGTAGAACTCTGAAC | 9558 |
| FBC_Oligo88 | CAGGTCAAGGGTGAGATCGTCGGACTGTAGAACTCTGAAC | 9559 |
| FBC_Oligo89 | CAGGTCCTTCACACGATCGTCGGACTGTAGAACTCTGAAC | 9560 |
| FBC_Oligo90 | CAGGTCAGGTTGCTGATCGTCGGACTGTAGAACTCTGAAC | 9561 |
| FBC_Oligo91 | CAGGTCACCCGAAAGATCGTCGGACTGTAGAACTCTGAAC | 9562 |
| FBC_Oligo92 | CAGGTCGAAAAGGGGATCGTCGGACTGTAGAACTCTGAAC | 9563 |
| FBC_Oligo93 | CAGGTCACTTCCCAGATCGTCGGACTGTAGAACTCTGAAC | 9564 |
| FBC_Oligo94 | CAGGTCTGCTGCATGATCGTCGGACTGTAGAACTCTGAAC | 9565 |
| FBC_Oligo95 | CAGGTCATTCCTGGGATCGTCGGACTGTAGAACTCTGAAC | 9566 |
| FBC_Oligo96 | CAGGTCCAGAACTCGATCGTCGGACTGTAGAACTCTGAAC | 9567 |

[0191] Table 2 describes a list of ooligonucleotide sequences used to generate the first set of barcoded beads (FBC) for combinatorial synthesis in Experiment 1.

[0192] The dual-biotinylated oligonucleotide was annealed at a final concentration of 2 μM in the presence of a four-fold molar excess of the barcoded oligonucleotide in a 96-well plate by stepwise cooling from 85° C. to 30° C. over 30 minutes. A DNA polymerase master mix was then added to each well such that the final concentration of the reaction components was 1× NEB Buffer 2 (New England BioLabs), 0.25 U/uL Klenow Fragment (exo-) (New England BioLabs), and 0.5 mM dNTPs. The reaction was incubated in each well at 37° C. for 30 minutes before heat inactivating the polymerase at 75° C. for 20 minutes.

[0193] An equal volume of beads was then added to each reaction mixture so that the extended, dual-biotinylated oligonucleotide could conjugate to the streptavidin coated beads at a final density of ˜1 billion oligonucleotide primers per bead. The conjugation reaction was incubated at room temperature overnight on a rotisserie and quenched with biotin at a final concentration of 2 mM and sodium hydroxide at a final concentration of 125 mM to melt the template strand off of the beads. The beads were then pooled and washed five times in 125 mM sodium hydroxide supplemented with 0.1 mM biotin and then washed an additional three times with Wash Buffer and 0.1 mM biotin. The beads were then re-suspended in Hybridization Buffer (20 mM Tris pH 8.0, 1 M NaCl, 0.1% Tween-20) supplemented with 0.1 mM biotin.

[0194] The pooled beads were split into ten reactions to which one of ten partially complementary oligonucleotides (Table 3) each containing a specific second barcode was added at a final concentration of 5 μM. The second barcode-containing oligonucleotides were allowed to hybridize to the beads at room temperature overnight on a rotisserie.

TABLE 3

| Oligo- | | SEQ ID |
|---|---|---|
| nucleotide | | |
| Name | Oligonucleotide Sequence | NO: |
| SBC_Oligo1 | AAAAAAAAAAAAAAAAAAAAAAAAAGGTGATACAG | 9568 |
| | GTCAAAAAAAAAGATCGTCGGACTGTAGAACTC | |
| SBC_Oligo2 | AAAAAAAAAAAAAAAAAAAAAAAAATGAATGCCAG | 9569 |
| | GTCAAAAAAAAAGATCGTCGGACTGTAGAACTC | |
| SBC_Oligo3 | AAAAAAAAAAAAAAAAAAAAAAAAATGCCAAACAG | 9570 |
| | GTCAAAAAAAAAGATCGTCGGACTGTAGAACTC | |
| SBC_Oligo4 | AAAAAAAAAAAAAAAAAAAAAAAAAACAGAAGCAG | 9571 |
| | GTCAAAAAAAAAGATCGTCGGACTGTAGAACTC | |
| SBC_Oligo5 | AAAAAAAAAAAAAAAAAAAAAAAAACACTGGACAG | 9572 |
| | GTCAAAAAAAAAGATCGTCGGACTGTAGAACTC | |
| SBC_Oligo6 | AAAAAAAAAAAAAAAAAAAAAAAAACGATGATCAG | 9573 |
| | GTCAAAAAAAAAGATCGTCGGACTGTAGAACTC | |
| SBC_Oligo7 | AAAAAAAAAAAAAAAAAAAAAAAAAGTGTCCACAG | 9574 |
| | GTCAAAAAAAAAGATCGTCGGACTGTAGAACTC | |
| SBC_Oligo8 | AAAAAAAAAAAAAAAAAAAAAAAAATCCTCTTCAG | 9575 |
| | GTCAAAAAAAAAGATCGTCGGACTGTAGAACTC | |
| SBC_Oligo9 | AAAAAAAAAAAAAAAAAAAAAAAAAGTGCAGTCAG | 9576 |
| | GTCAAAAAAAAAGATCGTCGGACTGTAGAACTC | |
| SBC_Oligo10 | AAAAAAAAAAAAAAAAAAAAAAAAAAGGTAGACAG | 9577 |
| | GTCAAAAAAAAAGATCGTCGGACTGTAGAACTC | |

[0195] Table 3 describes oligonucleotide sequences used to generate the second set of barcoded beads (SBC) for combinatorial synthesis in Experiment 1.

[0196] The beads were then washed five times in Wash Buffer supplemented with 0.1 mM biotin and then re-suspended in a reaction mixture with final concentrations of 0.5 mM dNTPs, 1× NEB Buffer 2 (New England BioLabs), and 0.1 mM biotin. We included biotin in the wash and storage buffers in order to saturate any remaining streptavidin sites on the beads so that, in the even that a barcoded capture primer dissociates form a beads, it cannot re-associate with a different bead. The reactions were cooled to 16° C. on a thermocycler and Klenow Fragment (exo-) (New England BioLabs) was added at a final concentration of 0.25 U/uL. The reaction was incubated for one hour at 16° C. with mixing every 10 minutes with a pipette followed by heat inactivation at 75° C. for 20 minutes.

[0197] The ten reaction mixtures were then quenched and the hybridized strand was denatured by addition of sodium hydroxide to a final concentration of 125 mM. The reaction mixtures were then washed five times in 125 mM sodium hydroxide with 0.1 mM biotin, pooled, and then further washed three times with Wash Buffer supplemented with 0.1 mM biotin.

### Procedure for Single Cell RNA-Seq Experiment 1

[0198] Prior to the experiment, each lane of the device was flushed with 0.1% Tween-20 solution and incubated for several hours to hydrate the microwells, which were subsequently washed with 2 mL of phosphate-buffered saline (PBS). Cell suspensions were counted using Countess automated cell counter (Life Technologies). A suspension of cells in PBS mixed with Calcein AM (live stain) dye was flowed in to each lane and incubated for ˜5 mins, so that the cells load in to the microwells under gravity. After thoroughly washing out the excess cells with PBS, a suspension of barcoded capture beads that had been pre-counted by microscopy was introduced in PBS and allowed to load under gravity for ˜5 mins. In an aspect, ˜3,000 cells to each lane of the device was introduced. It is also noted that only 25% of the lower surface of each channel contains a microwell array, and so by expanding this area, the number of cells captured without incurring increased reagent costs for on-chip library generation were significantly increased (for example, as long as the size of the barcode pool was pooled). Excess beads were washed out thoroughly with PBS and the flow cell was incubated on ice. 20 μL 0.08% TritonX-100 (Sigma) supplemented with SUPERaseIN in PBS was flowed under ice-cold conditions immediately followed by fluorinert oil (Sigma) to seal the device. After two cycles of freeze-thaw at −80° C. to enhance cell lysis, the device was incubated at room temperature for 60 mins for mRNA capture (FIG. 2A).

[0199] Two of the lanes contained pure U87 and MCF10a cells, respectively, and other lanes were loaded with a mixture of both the cell types. All lanes were imaged twice, first with blue laser (λₑₓ=473 nm, Dragon Lasers) for imaging the cells and secondly with a red laser (λₑₓ=637 nm, Obis, Coherent) for imaging the beads labeled with AlexaFluor 647 tagged streptavidin. We used the two-color images to determine number of bead-cell pairs in the array. After an hour of incubation for mRNA capture, all the lanes were unsealed by rapid washing of the oil with 20 mM Tris, containing 1% TritonX-100 and SUPERaseIN, followed by Wash Buffer supplemented with SUPERaseIN. After this point the microwells stay open and subsequent enzymatic steps occur simultaneously in separate lanes of the open device.

[0200] The single cell library preparation protocol is adopted from the recently reported CEL-Seq protocol with few modifications as described below. The mRNA captured on the beads was reverse transcribed using ProtoScript II Reverse Transcriptase (New England Biolabs) for 2 hours at 42° C. in 1× ProtoScript Reverse Transcriptase buffer, supplemented with 10 mM DTT, 0.5 mM dNTPs, 0.1% Tween-20 and SUPERaseIN. The reaction mixture was washed out with Wash Buffer. The second strand synthesis was carried out using reagents from the MessageAmp II aRNA amplification kit (Ambion), where a mixture of DNA polymerase and RNaseH in second strand buffer was used along with dNTPs by incubating the device at 16° C. for 2 hours. After flushing out the second strand reaction mixture with Wash Buffer, an in vitro transcription mixture from the MessageAmp II kit containing four nucleotides and T7 RNA polymerase enzyme mix in T7 buffer was introduced to all lanes and incubated for 13 hours at 37° C. (FIGS. 5A-5C). The reaction linearly amplified our cDNA, eluting pools of barcoded aRNA into the flow channels of the device which was then removed from each lane using a pipette and purified separately using RNA Clean & Concentrator columns (Zymo) and eluted into five separate tubes. The aRNA from the 5 lanes was reverse transcribed separately using random hexamers tagged with five different barcodes and 8-base UMIs to differentiate cDNA for all five lanes and part of an Illumina sequencing adapter. The aRNA along with the hexamer primers was heated to 70° C. for 2 mins and immediately placed on ice for 5 mins. The reverse transcription mix containing PrimeScript Reverse Transcriptase (Clontech-Takara), 0.5 mM dNTPs, 10 mM DTT, 1× PrimeScript buffer supplemented with SUPERaseIN was added and incubated at 25° C. for 10 mins followed by 2 hour incubation at 42° C. The RNA-cDNA hybrid product was purified twice using 0.65× ratio of Agencourt Ampure beads (Beckman Coulter) and the purified cDNA from all the lanes were pooled together for PCR. Phusion High Fidelity DNA polymerase (New England Biolabs) was used for amplifying the cDNA using RP1 and RPI Illumina primers in 1× PhusionHF buffer supplemented with dNTPs. The PCR product was purified on a 1.5% agarose gel which was stained with SybrGold (Life Technologies) before being cut between 400-800 bp. The library was extracted from the gel using Gel Extraction kit (Qiagen), and further purified and concentrated using a 0.65× ratio of the AMpure beads (Beckman Coulter). The final library was quantified using a Qubit (Life Technologies) and Bioanalyzer (Agilent) and sequenced on NextSeq 500 desktop sequencer (Illumina). ˜240 million paired-end reads with a 26-base first read and a 66-base second read were obtained.

### Procedure for Single Cell RNA-Seq Experiment 2

[0201] Experiment 2 was identical to Experiment 1 with a few exceptions. First, the two cell types under study were U87 human glioma cells and WI-38 human fibroblast cells (a diploid, limited-passage, non-cancer cell line). Second, reagents from the HiScribe In Vitro Transcription kit (New England BioLabs) were substituted for the MessageAmp II kit for the IVT portion of the protocol. Third, some of the oligonucleotides used were different from in Experiment 1 and are tabulated as detailed in Tables 4-6.

[0202] Table 4 describes a group of preferred oligonucleotides used for barcoding and library preparation for Experiment 2.

TABLE 4

| Oligonucleotide Name | Oligonucleotide Sequence | SEQ ID NO: |
|---|---|---|
| Bead Capture Oligo (5′-dual biotinylated) | AGGTAAGGTAATACGACTCA | 9578 |
| | CTATAGGGGTTCAGAGTTCT | |
| | ACAGTCCGACGATC | |
| RT1 (Reverse Transcription Primer for Lane 1) | GCCTTGGCACCCGAGAATTC | 9579 |
| | CANNNNNNNNCGTCATNNNN | |
| | NN | |
| RT2 (Reverse Transcription Primer for Lane 2) | GCCTTGGCACCCGAGAATTC | 9580 |
| | CANNNNNNNNTACCCANNNN | |
| | NN | |
| RT3 (Reverse Transcription Primer for Lane 3) | GCCTTGGCACCCGAGAATTC | 9581 |
| | CANNNNNNNNGCCATTNNNN | |
| | NN | |
| RT4 (Reverse Transcription Primer for Lane 4) | GCCTTGGCACCCGAGAATTC | 9582 |
| | CANNNNNNNNGAGTACNNNN | |
| | NN | |
| RT5 (Reverse Transcription Primer for Lane 5) | GCCTTGGCACCCGAGAATTC | 9583 |
| | CANNNNNNNNAGAGTCNNNN | |
| | NN | |
| RP1 (PCR Primer 1) | AATGATACGGCGACCACCGA | 9584 |
| | GATCTACACGTTCAGAGTTC | |
| | TACAGTCCGA | |
| RPI2 (PCR Primer 2) | CAAGCAGAAGACGGCATACG | 9585 |
| | AGATACATCGGTGACTGGAG | |
| | TTCCTTGGCACCCGAGAATT | |
| | CCA | |

[0203] Table 5 describes oligonucleotide sequences used to generate the first set of barcoded beads (FBC) for_combinatorial synthesis in Experiment 2.

TABLE 5

| | | SEQ ID |
|---|---|---|
| Oligonucleotide Name | Oligonucleotide Sequence | NO: |
| FBC_Oligo1 | CAGGTCCTGATCGATGATCGTCGGACTGTAGAACTCTGAAC | 9586 |
| FBC_Oligo2 | CAGGTCGTGTAGACAGATCGTCGGACTGTAGAACTCTGAAC | 9587 |
| FBC_Oligo3 | CAGGTCCATTGTTCCGATCGTCGGACTGTAGAACTCTGAAC | 9588 |
| FBC_Oligo4 | CAGGTCCTTGACTACGATCGTCGGACTGTAGAACTCTGAAC | 9589 |
| FBC_Oligo5 | CAGGTCACCGTTTCGGATCGTCGGACTGTAGAACTCTGAAC | 9590 |
| FBC_Oligo6 | CAGGTCAAGGACCGTGATCGTCGGACTGTAGAACTCTGAAC | 9591 |
| FBC_Oligo7 | CAGGTCTCACTATGCGATCGTCGGACTGTAGAACTCTGAAC | 9592 |
| FBC_Oligo8 | CAGGTCCTGCAATGGGATCGTCGGACTGTAGAACTCTGAAC | 9593 |
| FBC_Oligo9 | CAGGTCTGAGTCGTCGATCGTCGGACTGTAGAACTCTGAAC | 9594 |
| FBC_Oligo10 | CAGGTCCTCACACTAGATCGTCGGACTGTAGAACTCTGAAC | 9595 |
| FBC_Oligo11 | CAGGTCTTACCCCCTGATCGTCGGACTGTAGAACTCTGAAC | 9596 |
| FBC_Oligo12 | CAGGTCCCAAGTAGAGATCGTCGGACTGTAGAACTCTGAAC | 9597 |
| FBC_Oligo13 | CAGGTCATAGCGCACGATCGTCGGACTGTAGAACTCTGAAC | 9598 |
| FBC_Oligo14 | CAGGTCTGACGTACGGATCGTCGGACTGTAGAACTCTGAAC | 9599 |
| FBC_Oligo15 | CAGGTCGTAGAGTTGGATCGTCGGACTGTAGAACTCTGAAC | 9600 |
| FBC_Oligo16 | CAGGTCTTTCTGGCGGATCGTCGGACTGTAGAACTCTGAAC | 9601 |
| FBC_Oligo17 | CAGGTCGGAATGTGTGATCGTCGGACTGTAGAACTCTGAAC | 9602 |
| FBC_Oligo18 | CAGGTCCTATGGAAGGATCGTCGGACTGTAGAACTCTGAAC | 9603 |
| FBC_Oligo19 | CAGGTCAAGTCCATGGATCGTCGGACTGTAGAACTCTGAAC | 9604 |
| FBC_Oligo20 | CAGGTCAGTACTTGGGATCGTCGGACTGTAGAACTCTGAAC | 9605 |
| FBC_Oligo21 | CAGGTCACAGGACTAGATCGTCGGACTGTAGAACTCTGAAC | 9606 |
| FBC_Oligo22 | CAGGTCACCAGGTAAGATCGTCGGACTGTAGAACTCTGAAC | 9607 |
| FBC_Oligo23 | CAGGTCGCATGAACCGATCGTCGGACTGTAGAACTCTGAAC | 9608 |
| FBC_Oligo24 | CAGGTCGTTGGTGTTGATCGTCGGACTGTAGAACTCTGAAC | 9609 |
| FBC_Oligo25 | CAGGTCCCTTCAGACGATCGTCGGACTGTAGAACTCTGAAC | 9610 |
| FBC_Oligo26 | CAGGTCCCTCTTGGTGATCGTCGGACTGTAGAACTCTGAAC | 9611 |
| FBC_Oligo27 | CAGGTCGGGAAAGTTGATCGTCGGACTGTAGAACTCTGAAC | 9612 |
| FBC_Oligo28 | CAGGTCAGCCAGAGTGATCGTCGGACTGTAGAACTCTGAAC | 9613 |
| FBC_Oligo29 | CAGGTCTCGCATCTGGATCGTCGGACTGTAGAACTCTGAAC | 9614 |
| FBC_Oligo30 | CAGGTCGATACGGCAGATCGTCGGACTGTAGAACTCTGAAC | 9615 |
| FBC_Oligo31 | CAGGTCTCGGCCAAAGATCGTCGGACTGTAGAACTCTGAAC | 9616 |
| FBC_Oligo32 | CAGGTCAGATTTCGCGATCGTCGGACTGTAGAACTCTGAAC | 9617 |
| FBC_Oligo33 | CAGGTCGACCCTCAAGATCGTCGGACTGTAGAACTCTGAAC | 9618 |
| FBC_Oligo34 | CAGGTCAGTCCACTCGATCGTCGGACTGTAGAACTCTGAAC | 9619 |
| FBC_Oligo35 | CAGGTCCAAACGATCGATCGTCGGACTGTAGAACTCTGAAC | 9620 |
| FBC_Oligo36 | CAGGTCGCCTAATAGGATCGTCGGACTGTAGAACTCTGAAC | 9621 |
| FBC_Oligo37 | CAGGTCGGCTACATCGATCGTCGGACTGTAGAACTCTGAAC | 9622 |
| FBC_Oligo38 | CAGGTCTATGAGCAGGATCGTCGGACTGTAGAACTCTGAAC | 9623 |
| FBC_Oligo39 | CAGGTCGGTAGTAACGATCGTCGGACTGTAGAACTCTGAAC | 9624 |
| FBC_Oligo40 | CAGGTCCGCGTATATGATCGTCGGACTGTAGAACTCTGAAC | 9625 |
| FBC_Oligo41 | CAGGTCTACTGGAGCGATCGTCGGACTGTAGAACTCTGAAC | 9626 |
| FBC_Oligo42 | CAGGTCAGGGAATCAGATCGTCGGACTGTAGAACTCTGAAC | 9627 |
| FBC_Oligo43 | CAGGTCATCCGAGATGATCGTCGGACTGTAGAACTCTGAAC | 9628 |
| FBC_Oligo44 | CAGGTCTCCCAAGCAGATCGTCGGACTGTAGAACTCTGAAC | 9629 |
| FBC_Oligo45 | CAGGTCGAGCCGTTTGATCGTCGGACTGTAGAACTCTGAAC | 9630 |
| FBC_Oligo46 | CAGGTCTGCTCTTACGATCGTCGGACTGTAGAACTCTGAAC | 9631 |
| FBC_Oligo47 | CAGGTCACGACTACCGATCGTCGGACTGTAGAACTCTGAAC | 9632 |
| FBC_Oligo48 | CAGGTCCAAGCAGCTGATCGTCGGACTGTAGAACTCTGAAC | 9633 |
| FBC_Oligo49 | CAGGTCGTATTCGCGATCGTCGGACTGTAGAACTCTGAAC | 9634 |
| FBC_Oligo50 | CAGGTCGCTCTGAAGATCGTCGGACTGTAGAACTCTGAAC | 9635 |
| FBC_Oligo51 | CAGGTCACGTAGTGGATCGTCGGACTGTAGAACTCTGAAC | 9636 |
| FBC_Oligo52 | CAGGTCATTGGGTCGATCGTCGGACTGTAGAACTCTGAAC | 9637 |
| FBC_Oligo53 | CAGGTCAACAGCACGATCGTCGGACTGTAGAACTCTGAAC | 9638 |
| FBC_Oligo54 | CAGGTCTCAGAGACGATCGTCGGACTGTAGAACTCTGAAC | 9639 |
| FBC_Oligo55 | CAGGTCGTGTGCTAGATCGTCGGACTGTAGAACTCTGAAC | 9640 |
| FBC_Oligo56 | CAGGTCGCAGTTGAGATCGTCGGACTGTAGAACTCTGAAC | 9641 |
| FBC_Oligo57 | CAGGTCTTAACGGGGATCGTCGGACTGTAGAACTCTGAAC | 9642 |
| FBC_Oligo58 | CAGGTCGCTCGATTGATCGTCGGACTGTAGAACTCTGAAC | 9643 |
| FBC_Oligo59 | CAGGTCACACCTGTGATCGTCGGACTGTAGAACTCTGAAC | 9644 |
| FBC_Oligo60 | CAGGTCAGACGGTTGATCGTCGGACTGTAGAACTCTGAAC | 9645 |
| FBC_Oligo61 | CAGGTCGCAAACCAGATCGTCGGACTGTAGAACTCTGAAC | 9646 |
| FBC_Oligo62 | CAGGTCGAGTATGGGATCGTCGGACTGTAGAACTCTGAAC | 9647 |
| FBC_Oligo63 | CAGGTCGGTCTTTCGATCGTCGGACTGTAGAACTCTGAAC | 9648 |
| FBC_Oligo64 | CAGGTCCATCTGCTGATCGTCGGACTGTAGAACTCTGAAC | 9649 |
| FBC_Oligo65 | CAGGTCTTCGCAAGGATCGTCGGACTGTAGAACTCTGAAC | 9650 |
| FBC_Oligo66 | CAGGTCTTGTGACGGATCGTCGGACTGTAGAACTCTGAAC | 9651 |
| FBC_Oligo67 | CAGGTCTGCATGACGATCGTCGGACTGTAGAACTCTGAAC | 9652 |
| FBC_Oligo68 | CAGGTCCAACGTGAGATCGTCGGACTGTAGAACTCTGAAC | 9653 |
| FBC_Oligo69 | CAGGTCTAGGCTTCGATCGTCGGACTGTAGAACTCTGAAC | 9654 |
| FBC_Oligo70 | CAGGTCTGGTAGGAGATCGTCGGACTGTAGAACTCTGAAC | 9655 |
| FBC_Oligo71 | CAGGTCTGCAGCTTGATCGTCGGACTGTAGAACTCTGAAC | 9656 |
| FBC_Oligo72 | CAGGTCCTGTACCTGATCGTCGGACTGTAGAACTCTGAAC | 9657 |
| FBC_Oligo73 | CAGGTCCGCAATGAGATCGTCGGACTGTAGAACTCTGAAC | 9658 |
| FBC_Oligo74 | CAGGTCGATCCAAGGATCGTCGGACTGTAGAACTCTGAAC | 9659 |
| FBC_Oligo75 | CAGGTCCACTTACGGATCGTCGGACTGTAGAACTCTGAAC | 9660 |
| FBC_Oligo76 | CAGGTCAACTAGGCGATCGTCGGACTGTAGAACTCTGAAC | 9661 |
| FBC_Oligo77 | CAGGTCACTAGCGTGATCGTCGGACTGTAGAACTCTGAAC | 9662 |
| FBC_Oligo78 | CAGGTCCGTTCGTTGATCGTCGGACTGTAGAACTCTGAAC | 9663 |
| FBC_Oligo79 | CAGGTCAGTCACGAGATCGTCGGACTGTAGAACTCTGAAC | 9664 |
| FBC_Oligo80 | CAGGTCCCTGTAACGATCGTCGGACTGTAGAACTCTGAAC | 9665 |
| FBC_Oligo81 | CAGGTCGTCCTCTTGATCGTCGGACTGTAGAACTCTGAAC | 9666 |
| FBC_Oligo82 | CAGGTCCAGCGAATGATCGTCGGACTGTAGAACTCTGAAC | 9667 |
| FBC_Oligo83 | CAGGTCATGGTTGGGATCGTCGGACTGTAGAACTCTGAAC | 9668 |
| FBC_Oligo84 | CAGGTCGAGGTTCTGATCGTCGGACTGTAGAACTCTGAAC | 9669 |
| FBC_Oligo85 | CAGGTCTACCTCGAGATCGTCGGACTGTAGAACTCTGAAC | 9670 |
| FBC_Oligo86 | CAGGTCTTCTGTGCGATCGTCGGACTGTAGAACTCTGAAC | 9671 |
| FBC_Oligo87 | CAGGTCGACAACTGGATCGTCGGACTGTAGAACTCTGAAC | 9672 |
| FBC_Oligo88 | CAGGTCCGACAACAGATCGTCGGACTGTAGAACTCTGAAC | 9673 |
| FBC_Oligo89 | CAGGTCTCGATACCGATCGTCGGACTGTAGAACTCTGAAC | 9674 |
| FBC_Oligo90 | CAGGTCCCATACTCGATCGTCGGACTGTAGAACTCTGAAC | 9675 |
| FBC_Oligo91 | CAGGTCATTCGCAGGATCGTCGGACTGTAGAACTCTGAAC | 9676 |
| FBC_Oligo92 | CAGGTCACCATAGGGATCGTCGGACTGTAGAACTCTGAAC | 9677 |
| FBC_Oligo93 | CAGGTCCGATCAAGGATCGTCGGACTGTAGAACTCTGAAC | 9678 |
| FBC_Oligo94 | CAGGTCACCTTGCTGATCGTCGGACTGTAGAACTCTGAAC | 9679 |
| FBC_Oligo95 | CAGGTCGACTCAGTGATCGTCGGACTGTAGAACTCTGAAC | 9680 |
| FBC_Oligo96 | CAGGTCGTCAATCCGATCGTCGGACTGTAGAACTCTGAAC | 9681 |

[0204] Table 6 provides for oligonucleotide sequences used to generate the second set of barcoded beads (SBC) for combinatorial synthesis in Experiment 2.

TABLE 6

| Oligonucleotide Name | Oligonucleotide Sequence | SEQ ID NO: |
|---|---|---|
| SBC_Oligo1 | AAAAAAAAAAAAAAAAAAAAAAAAAGGTGATACAGGT | 9682 |
| | CAAAAAAAAAGATCGTCGGACTGTAGAACTC | |
| SBC_Oligo2 | AAAAAAAAAAAAAAAAAAAAAAAAATGAATGCCAGGT | 9683 |
| | CAAAAAAAAAGATCGTCGGACTGTAGAACTC | |
| SBC_Oligo3 | AAAAAAAAAAAAAAAAAAAAAAAAATGCCAAACAGGT | 9684 |
| | CAAAAAAAAAGATCGTCGGACTGTAGAACTC | |
| SBC_Oligo4 | AAAAAAAAAAAAAAAAAAAAAAAAAACAGAAGCAGGT | 9685 |
| | CAAAAAAAAAGATCGTCGGACTGTAGAACTC | |
| SBC_Oligo5 | AAAAAAAAAAAAAAAAAAAAAAAAACACTGGACAGGT | 9686 |
| | CAAAAAAAAAGATCGTCGGACTGTAGAACTC | |
| SBC_Oligo6 | AAAAAAAAAAAAAAAAAAAAAAAAACGATGATCAGGT | 9687 |
| | CAAAAAAAAAGATCGTCGGACTGTAGAACTC | |
| SBC_Oligo7 | AAAAAAAAAAAAAAAAAAAAAAAAAGTGTCCACAGGT | 9688 |
| | CAAAAAAAAAGATCGTCGGACTGTAGAACTC | |
| SBC_Oligo8 | AAAAAAAAAAAAAAAAAAAAAAAAATCCTCTTCAGGT | 9689 |
| | CAAAAAAAAAGATCGTCGGACTGTAGAACTC | |
| SBC_Oligo9 | AAAAAAAAAAAAAAAAAAAAAAAAAGTGCAGTCAGGT | 9690 |
| | CAAAAAAAAAGATCGTCGGACTGTAGAACTC | |
| SBC_Oligo10 | AAAAAAAAAAAAAAAAAAAAAAAAAAGGTAGACAGGT | 9691 |
| | CAAAAAAAAAGATCGTCGGACTGTAGAACTC | |

### Analysis of Single Cell RNA-Seq Data

[0205] Read 1 of the single cell RNA-Seq data contains a cell-identifying barcode sequence followed by poly(dT), and read 2 contains a 8-base UMI followed by a 6-base lane-identifying barcode and a transcript sequence. The reads are first demultiplex based on the lane-identifying barcode while recording the corresponding UMI using a custom Python script. We then map the remainder of read 2 to the human genome and transcriptome (hg19, Ensembl annotation from Illumina iGenomes) using the STAR aligner. Mapped reads for each lane are then demultiplexed based on the cell-identifying barcodes in read 1 and assigned to a gene using HTSeq. Both the lane- and cell-identifying barcodes were allowed to have a single-base mismatch during demultiplexing.

[0206] The set of reads that uniquely mapped to the transcriptome were collected and assigned an address comprised of its cell-identifying barcode, gene, UMI, and mapping position. In addition, the reads that mapped to both the genome and transcriptome were kept, but that mapped to only one position on the transcriptome and mapped to that position with the appropriate strand-specificity. The reads to identify unique molecules were filtered. Reads with identical addresses were collapsed to a single molecule. In addition, reads with identical cell-identifying barcodes, genes, mapping positions, and with UMIs having a Hamming distance less than or equal to two were collapsed to a single molecule. All reads considered identical molecules by the above definition (UMIs with a Hamming distance less than or equal to two and mapping position within six bases) were removed but that also occurred with different cell-identifying barcodes within the same lane. This approach likely underestimates of the true number of molecules associated with each cell and gene and results in some loss of gene detection. However, it also removes molecules that may become spuriously associated with the incorrect cell via PCR recombination, as observed and similarly filtered in previous studies that used very similar library construction protocols.

[0207] To identify barcodes that correspond to actual individual cells in our device in Experiment 1, the observed cell-identifying barcodes were filtered by progressively downsampling the corresponding gene profiles to the same number of total reads and assessing the number of unique molecules detected from each cell-identifying barcode. After excluding cell-identifying barcodes having zero associated molecules, it was found that the distribution of associated unique molecules to be bimodal, with one small subpopulation having nearly as many unique molecules as reads at low read totals. It was found the size of this subpopulation to be in excellent agreement with our device imaging data These 598 profiles were taken to represent the actual individual cells captured in the device with a barcoded bead. We used the same approach to assess the cell-identifying barcodes in Experiment 2.

[0208] The 396 single-cell profiles were kept with the highest coverage in the data set (all five lanes represented). The U87 and MCF10a single cell profiles were compared to bulk RNA-Seq profiles of U87 and MCF10a cells. Bulk RNA-Seq library from ˜107 U87 cells were prepared using the TruSeq RNA-Seq library preparation kit (Illumina) and sequenced the library to a depth of ˜30M, 100-base single-end reads on an Illumina HiSeq 2500. Publically available bulk RNA-Seq profile of MCF10a cells was obtained from the Gene Expression Omnibus (entry GSE45258). Reads were mapped to the transcriptome as described above and expression values (FPKM) were computed using Cufflinks. Pearson correlation coefficients between single cell and bulk profiles were computed between log-transformed single-cell expression profiles (unique molecules per million reads plus one) and log-transformed bulk values (FPKM plus one). Single cell median profiles were generated from different numbers of randomly selected single cell profiles and repeated this random sampling ten times without replacement for each data point in FIGS. 7A and 7B. For each Pearson correlation calculation, only genes with log-transformed single cell median or bulk values greater than 0.5 were included.

[0209] Differential expression analysis was conducted by comparing each detected gene in the two cell type-exclusive lanes using Wilcoxin's rank-sum test. Genes with p<0.05 were used for clustering analysis. Regardless of differential expression +/−(1-p) was used (which is positive for expression biased in one cell type and negative for expression biased towards a second cell type) for each gene as input to iPAGE, a mutual information-based algorithm that can associate gene ontologies with genes based on an assigned numerical value[35]. A matrix of pairwise Spearman correlation coefficients was generated based on unique molecules detected across 396 single cell profiles in Experiment 1 (247 profiles in Experiment 2) using only the differentially expressed genes. The data was then clustered with the MATLAB implementation t-SNE using the correlation matrix as input. The single cell profiles were color coated in the t-SNE clusters using a simple classifier score given by the log-ratio of the number of cell type-specific genes for each of the two cell types in a given cell with an above-average rank in expression level (FIG. 8C).

[0210] Table 7 describes estimated costs per reagents and associated costs in an aspect of the disclosure.

TABLE 7

| | | Stock | Price | Price |
|---|---|---|---|---|
| Reagent | Volume | Volume | of Stock | per Run |
| SUPERaseIN | 19 uL | 500 uL | $350.40 | $13.32 |
| (Ambion) | | | | |
| dNTPs (NEB) | 10 uL | 800 uL | $44.80 | $0.56 |
| HiScribe IVT Kit | 1 uL | 50 uL | $169.60 | $3.39 |
| (NEB) | | | | |
| MessageAamp II | 3 uL | 740 uL | $3,668.00 | $14.87 |
| Kit (Ambion) | | | | |
| PrimeScript RT | 5 uL | 200 uL | $501.63 | $12.54 |
| (Clontech) | | | | |
| Phusion | 0.5 uL | 250 uL | $336.00 | $0.67 |
| polymerase (NEB) | | | | |
| Lane Barcode RT | 15 uL | 3155 uL | $542.25 | $0.86 |
| primers (IDT) | | | | |
| NHS beads (GE) | 3.25 uL | 25000 uL | $155.80 | $0.02 |
| Streptavidin (NEB) | 5 uL | 1000 uL | $188.80 | $0.94 |
| Dual-biotin | 0.64 uL | 700 uL | $225.75 | $0.21 |
| anchor oligo (IDT) | | | | |
| Klenow fragment | 1.5 uL | 200 uL | $188.80 | $1.42 |
| exo-(NEB) | | | | |
| dNTPs (NEB) | 3.5 uL | 800 uL | $44.80 | $0.20 |
| FBC primers (IDT) | 0.96 uL (all | 240,000 | $484.56 | $0.002 |
| | 96) | (all 96) | total | |
| SBC primers (IDT) | 0.66 uL (all | 4000 uL | $340.00 | $0.67 |
| | 10) | (all 10) | total | |
| Experiment Costs | | | | $46.21 |
| Bead Costs | | | | $3.46 |
| Total Cost per | | | | $49.67 |
| Run | | | | |
| Cost per Cell | 250-500 | | | $0.10- |
| | cells | | | $0.20 |

### Example 3

### Bead Synthesis

[0211] 1 million sequence-barcoded mRNA capture beads (MACOSKO-2011-10, ChemGenes) were washed 6 times with DI water, re-suspended in 1280 μL of DI water, and evenly distributed to 64 wells on a 96-well plate. The plate is then sealed with adhesive cover, vortexed for 5 minutes, centrifuged at 300 g for 1 minute, sonicated in a water batch sonicator (FS-20, Fisher Scientific) for 5 minutes, incubated at 4° C. for 12 hours, and centrifuged again at 300 g for 1 minute.

### Library Preparation and Sequencing of the Bead-Free DNA

[0212] 5 μL supernatant from each well was collected and mixed with 10 μL of 1 μM Nexterapoly A primer and 2 μL 10× NEBuffer 2 (B7002S, NEB) in separate wells on a 96-well plate. The mixtures were incubated at 95° C. for 2 minutes, then cooled down to 25° C. on a thermocycler. 2 μL of 10 mM dNTPs (N0447S, NEB) and 1 μL of DNA polymerase (M0212S, NEB) were then added to each reaction mixture, incubated at 25° C. for 15 minutes and at 37° C. for 1 hour followed by heat inactivation of the DNA polymerase at 75° C. for 20 minutes, then cooled down to 4° C. 4 μL sample from each reaction was mixed with 2 μL of 2 μM well-specific barcoded custom P7 primer, 2 μL of 2 μM custom P5 primer (AATGATACGGCGACCACCGAGATCTACACGCCTGTCCGCGGAAGCAGTGGT ATCAACGCAGAGT*A*C (SEQ ID NO: 9692), IDT), and 8 μL of 2× Kapa HiFi Hotstart Readymix (KK2601, Kapabiosystems). The mixture was then subjected to a PCR amplification protocol (95° C. 3 minutes, 14 cycles of (95° C. 10 s, 55° C. 30 s, 72° C. 30 s), 72° C. 5 minutes, hold at 4° C.). 5 μL of the PCR product from each reaction were pooled together and purified using the solid-phase reversible immobilization (SPRI) paramagnetic bead technology (A63880, Beckman Coulter) with a 2:1 bead-to-sample volume ratio and eluted in 50 μL of nuclease free water. The PCR product was further purified by gel electrophoresis (456-5034, Biorad). A 180 bp gel band (FIG. 19) was observed and extracted. The extracted product was further analyzed by capillary gel electrophoresis (5067-4626, Agilent Technologies) to further examine the length distribution of the purified product (FIGS. 20A and 20B).

Ligation of Optical Oligoes to the mRNA Capture Beads

[0213] The remaining beads in each well were washed with DI water and resuspended in a 50 μL reaction mixture that contained 5 μL of 10× T4 RNA ligase reaction buffer (M0204S, NEB), 25 μL of 50% PEG 8000 (M0204S, NEB), 5 μL of 10 Mm ATP (M0204S, NEB), 1 μL of 5% Tween-20, 2.5 μL of T4 RNA ligase 1 (M0204S, NEB), a well-specific unique combination of a set of 6 optical barcode oligo species (2 μL at 100 μM each), and water. The reactions were incubated at room temperature for 24 hours on a rotisserie. 5 μL of 10% SDS and 1 μL of 500 Mm EDTA were then added to each well, and incubated for 5 minutes at room temperature. All beads were then pooled together into a single microcentrifuge tube, washed twice with TE/TW buffer (10 mM Tris-HCl, 1 mM EDTA, 0.01% Tween-20, pH 8.0) and re-suspended in 1280 μL of TE/TW buffer.

[0214] The beads were subjected to a second round of the synthesis workflow described above using a separate set of 64 well-specific barcoded custom P7 primers in the PCR amplification of bead-free oligoes and a separate set of 6 optical barcode oligoes for the ligation reactions.

[0215] The 128 bead-free DNA libraries resulted from the above two rounds of synthesis reactions were sequenced on a NextSeq 500 machine (Illumina) with a custom read 1 sequencing primer (GCCTGTCCGCGGAAGCAGTGGTATCAACGCAGAGTAC (SEQ ID NO: 9693), IDT). 21 bases were sequenced on read 1. The resulting raw fastq files were processed to obtain the list of sequence-barcoded mRNA capture beads that were present in each of the 128 ligation reactions to which a unique known combination of optical barcode oligoes were added. Thus, a two-column look-up table was obtained where each row represents a bead, one column contains a 12-base sequencing barcode sequence, and the other column contains a 12-digit binary optical barcode sequence.

### Example 4: Mixed Species Experiment

[0216] FIGS. 21A and 21B present integrated sequencing and imaging data for a mixed species experiment. Mixed human-mouse single-cell RNA-Seq data was projected using tSNE, revealing two clusters of cells that correspond to U87 (human) and 3T3 (mouse). The points in the tSNE plot were shaded according to the fluorescence intensity of the two live stain dyes, one of which was used to stain U87 (human) and 3T3 (mouse). The vast majority of cells with high fluorescence intensity in the channel used to image human cells are in the human cluster and vice versa, demonstrating the efficacy of the approach even without any error-correcting barcodes.

### Device Preparation

[0217] On the day before the experiment, a microwell array flow cell device that has 15,000 microwells was filled with wash buffer (20 Mm Tris-HCl, 50 Mm NaCl, 0.1% Tween-20, pH 7.9) and stored in a humid chamber (a pipette tip box half-filled with water) at room temperature. On the day of the experiment, the device was washed by TBS buffer.

### Cell Preparation

[0218] Human U87 cells and mouse 3T3 cells were live stained respectively with 4 μM green (C3100MP, ThermoFisher Scientific) and orange-red (C34851, ThermoFisher Scientific) live stain dyes in cell culture media (10% FBS in DMEM) in a 37° C. incubator for 15 minutes. The cells were then dissociated into single cell suspension in separate colonial tubes using 0.25% Trypsin-EDTA (25200-072, Life Technologies), re-suspended in TBS, and counted.

### Cell Loading and Imaging

[0219] The two cell lines were then mixed at 1:1 ratio and diluted into 1000 total cells/uL concentration. 20 μL diluted mixed species cell suspension was then pipetted into the microwell array flow cell device and incubated for 3 minutes. Any uncaptured cells were flushed out by a TBS buffer wash. The cell-loaded device was then scanned in three channels including bright field, green, and orange channels.

Reagent Preparation for scRNA-Seq Library Prep

[0220] While the device was being scanned, fresh lysis buffer (1% 2-Mercaptoethanol, 99% Buffer TCL (1031576, Qiagen)), RNase inhibitor doped wash buffer (0.02U/uL SUPERaseIN (AM2696, Thermo Fisher Scientific) in wash buffer), reverse transcription (RT) reaction mix (1× Maxima RT buffer, 1 Mm dNTPs, 1 U/uL SUPERaseIN, 2.5 μM template switch oligo (AAGCAGTGGTATCAACGCAGAGTGAATrGrGrG (SEQ ID NO: 9694), IDT), 10 U/uL Maxima H Minus reverse transcriptase (EP0752, Thermo Fisher Scientific), 0.1% Tween-20), and perfluorinated oil (F3556-25ML, Sigma-Aldrich) were prepared and loaded into their designated reservoirs on an automated reagent delivery/temperature control system as described before (Yuan & Sims, Scientific Reports 6, 33883 (2016)). The perfluorinated oil, lysis buffer, wash buffer reagent channels were primed by sequentially turning on the channels for 10 seconds, 10 seconds, and 30 seconds, respectively.

### Bead Loading

[0221] After the device scan was completed, about 20000 of dual-barcoded mRNA capture beads were re-suspended in 30 μL of TBS buffer and then loaded into the device. Gentle flow (<3 μL/s) were used for the bead loading and all subsequent fluid exchange in the device to minimize cell and bead loss. Bead suspension was circulated through the device 5 to 10 times to achieve a high bead loading rate (defined as the fraction of wells having a bead) and a high bead capture efficiency (defined as the fraction of beads captured in the wells). Uncaptured beads were then washed out by a TBS buffer wash.

Automated Cell Lysis, mRNA Capture, cDNA Synthesis and Barcoding

[0222] The cell/bead loaded device was then connected to the system for the automated cell lysis, mRNA capture, and cDNA synthesis and barcoding. The device was temporarily disconnected from the fluidic system, scanned on a fluorescence microscope, and then reconnected to the fluidic system. Fluorescent signal from the stained cell lysate is used to check sealing integrity and the completeness of cell lysis.

### Removal of Unused Capture Primers by Exo-I Digestion

[0223] When reverse transcription reaction was completed, the device was washed with wash buffer, refilled with Exo-I reaction mixture (1× Exo-I buffer, 1 U/uL Exo-I (M0293L, NEB)), and incubated at 37° C. for 45 minutes, cooled down to room temperature, and washed with TE/TW buffer.

### Sequential Fluorescence Hybridization

[0224] The device was then connected to an automated reagent delivery/scanning system for 12 rounds of sequential fluorescence hybridization in order to measure the presence of each of the 12 optical barcode oligoes on each bead in the device. Cy5-labled oligoes whose sequences are complementary to the ligated optical barcode oligoes were used as the read-out probes. During each round of fluorescence hybridization, the device was first scanned in both bright field and the Cy5 probe channel. 200 nM probe diluted in wash buffer was then flowed into the device, followed by a 10-minute incubation step. Unbound probe molecules were then washed out using wash buffer. The device was scanned again in both bright field and Cy5 probe channel. 150 mM NaOH in water was then flowed into the device, followed by a 10-minute incubation step. Detached probe molecules were then washed out using wash buffer, which concludes one round of fluorescence hybridization.

### Bead Extraction

[0225] Once all 12 rounds of fluoresce hybridization were complete, the device was cut evenly into multiple pieces using a razor blade such that each piece contained about 400 cell/bead pairs. The pieces were processed in parallel in separate reaction tubes. Beads in each piece were extracted by a 30-second gentle water bath sonication in ethanol followed by a 1-minute centrifugation at 200g. The extracted beads were then washed with 1 mL 150 mM NaOH, 1 mL TE/TW buffer, and 1 mL water.

Pre-Amplification of Full-Length cDNA

[0226] The small pieces of device were then assembled together and scanned to identify the borderlines between the small pieces. Beads from each piece were split into four 50 μL PCR reactions that contains 25 μL of 2× Kapa HiFi Hotstart Readymix (KK2601, Kapabiosystems), 0.5 μL 100 μM SMRTpcr primer (AAGCAGTGGTATCAACGCAGAGT, IDT), and 24.5 μL of water. The mixtures were subjected to a PCR amplification protocol on a thermocycler (95° C. 3 minutes, 4 cycles of (98° C. 20 seconds, 65° C. 45 seconds, 72° C. 3 minutes), 8 cycles of (98° C. 20 seconds, 67° C. 20 seconds, 72° C. 3 minutes), 72° C. 5 minutes, hold at 4° C.). SMRT PCR product (supernatant only) of beads from each small piece were pooled together and purified using the SPRI paramagnetic bead technology (A63880, Beckman Coulter) with a 0.6:1 bead-to-sample volume ratio and eluted in 10 μL of nuclease free water. The purified products were then quantified by a fluorimeter.

Amplification and Sequencing of Tagmented cDNA

[0227] The small pieces of device were then assembled together and scanned to identify the borderlines between the small pieces. Beads from each piece were split into four 50 μL PCR reactions that contains 25 μL of 2× Kapa HiFi Hotstart Readymix (KK2601, Kapabiosystems), 0.5 μL 100 μM SMRTpcr primer (AAGCAGTGGTATCAACGCAGAGT (SEQ ID NO: 9696), IDT), and 24.5 μL of water. The mixtures were subjected to a PCR amplification protocol on a thermocycler (95° C. 3 minutes, 4 cycles of (98° C. 20 seconds, 65° C. 45 seconds, 72° C. 3 minutes), 8 cycles of (98° C. 20 seconds, 67° C. 20 seconds, 72° C. 3 minutes), 72° C. 5 minutes, hold at 4° C.). SMRT PCR product (supernatant only) of beads from each small piece were pooled together and purified using the SPRI paramagnetic bead technology (A63880, Beckman Coulter) with a 0.6:1 bead-to-sample volume ratio and eluted in 10 μL of nuclease free water. The purified products were then quantified by a fluorimeter.

Amplification and Sequencing of Tagmented cDNA

[0228] Purified product from each of the small piece was tagmented, barcoded, and amplified using a commercially available kit (Nextera XT, FC-131-1024, Illumina) per the vendor's instructions with the following modifications. First, 0.6 ng was used as input for each reaction. Second, a custom P5 primer (AATGATACGGCGACCACCGAGATCTACACGCCTGTCCGCGGAAGCAGTGGT ATCAACGCAGAGT*A*C (SEQ ID NO: 9692), IDT) was used in the PCR amplification. The Nextera PCR products were then pooled and purified twice using the SPRI paramagnetic bead technology (A63880, Beckman Coulter) with a 0.6:1 and 1:1 bead-to-sample volume ratios in the first and second round of purification respectively. The purified Nextera PCR product was sequenced on a NextSeq 500 machine (Illumina) with a custom read 1 sequencing primer (GCCTGTCCGCGGAAGCAGTGGTATCAACGCAGAGTAC (SEQ ID NO: 9695), IDT). 21 bases were sequenced on read 1 and 63 bases were sequenced on read 2. The raw fastq files generated by sequencers were processed to obtain a digital expression matrix where each column represents the expression profile of a cell and each row represents the expression level of a gene for cells from each of the small pieces. The look-up table generated in the bead synthesis step was then used to link each cell's imaging phenotype to sequencing barcode sequence of the bead that resided in the same well with the cell and the associated mRNA expression profile.

### Example 5

### Merged Barcode for Sequence/Microscope

[0229] In the dual barcode embodiment described in previous examples, the mRNA capture beads contain two barcodes. The first barcode (sequencing barcode) becomes associated with the cDNA library obtained from each individual cell and distinguishes the cDNA from each cell on the sequencer. The second barcode (optical barcode) is used to identify the same cell by imaging with a microscope. Having two separate barcodes requires two manufacturing steps to synthesize the beads. Having two separate barcodes also requires a separate sequencing experiment to determine which optical barcode is attached to each sequencing barcode, as these are associated randomly in the synthesis process. To avoid these complications, an embodiment is provided wherein the sequencing barcode and the optical barcode are merged into the same entity.

[0230] In the dual barcode embodiment described in previous examples, the optical barcode is attached to a subset of the mRNA capture sites (poly-dT sequences) on each bead. This reduces the number of sites available for mRNA capture and therefore efficiency. This problem is avoided by making the sequencing barcode and optical barcode the same entity, because the resulting merged barcode can be located upstream of the mRNA capture site and does not have to be attached to its 3′-end, which ablates its ability to prime cDNA synthesis.

[0231] In the dual barcode embodiment described in previous examples, because only a subset of mRNA capture sites on each bead can be occupied by an optical barcode, the fluorescence signal obtainable from the optical barcode is relatively low. The fluorescence signal is improved by making the sequencing barcode and optical barcode the same entity, since the resulting merged barcode can be located upstream of the mRNA capture site and 100% of oligonucleotides on the bead can contain an optical barcode.

[0232] The merged barcode permits a simpler manufacturing process for optically barcoded mRNA capture beads, yields higher signal-to-noise allowing use of simpler microscopy equipment, and provides higher-quality scRNA-seq data.

[0233] The merged barcodes can be characterized by three parameters: N, M, and L. Each merged barcode contains N oligonucleotide sequence blocks. There is a unique set of M oligonucleotide sequences, each of length L nucleotides for each of the N blocks. For each sequence block on each bead, an oligonucleotide sequence is selected from the corresponding set of M oligonucleotide sequences. For example, for a given bead, the oligonucleotide sequence of block 1 would be chosen from the first set of M oligonucleotide sequences and the oligonucleotide sequence of block 2 would be chosen from the second set of M oligonucleotide sequences, etc. In this way, one can combinatorially generate a set of M\hat{ }N unique merged barcodes from M×N oligonucleotide sequences. For example, if M=100 and N=2, one could generate 100\hat{ }2=10,000 unique merged barcodes from 2 sets of 100 oligonucleotide sequences (M×N=100×2=200 total oligonucleotide sequences). If sequential fluorescence hybridization is to be used as a read-out, then it is convenient for all M×N oligonucleotide sequences to be unique. However, if sequencing is to be used as a read-out, then one could have, for example, identical sets of M oligonucleotide sequences for each block because the positional information afforded by sequencing could be used to distinguish the N oligonucleotide sequence blocks.

[0234] One approach to manufacturing beads conjugated to merged barcodes as described above is to use split-pool ligation of oligonucleotides. Consider the case that N=2 and M=96. One would purchase a 96-well plate of unique, 5′-phosphorylated oligonucleotides for each of the two sequence blocks in the barcode. One would then take beads conjugated to a universal oligonucleotide sequence adapter and add them to each well of the first 96-well plate along with reagents for DNA ligation (e.g., DNA ligase, an appropriate buffer, ATP). This set of 96 reactions would produce a library of beads conjugated to 96 different oligonucleotide sequences. Next, one would mix all of the beads from all 96 wells together in a single vessel and then add an equal proportion of the resulting pool to each of the 96 wells in the second plate of unique, 5′-phosphorylated oligonucleotides along with reagents for DNA ligation. At the end of this second reaction, one would again mix all of the beads from all 96 wells together in a single vessel. The second set of 96 reactions would produce a library of beads conjugated to 96\hat{ }2=9,216 unique merged barcodes.

[0235] A second approach to manufacturing beads conjugated to merged barcodes as described above is to use split-pool solid-phase oligonucleotide synthesis. Consider again the case that N=2 and M=96. One would take beads conjugated to a universal oligonucleotide sequence adapter and split them into 96 wells. One would then use solid-phase (e.g., phosphoramidite-based) oligonucleotide synthesis to synthesize a unique oligonucleotide sequence onto the end of the universal oligonucleotide sequence adapters on the beads in each well. This set of 96 reactions would produce a library of beads conjugated to 96 different oligonucleotide sequences. Next, one would mix all of the beads from all 96 wells together in a single vessel and then add an equal proportion of the resulting pool to each of the 96 wells in the second plate. In the second plate, one would again use solid-phase (e.g., phosphoramidite-based) oligonucleotide synthesis to synthesize a unique oligonucleotide sequence onto the end of the first barcode sequence block that had been added to each bead in the first plate. At the end of this second reaction, one would again mix all of the beads from all 96 wells together in a single vessel. The second set of 96 reactions would produce a library of beads conjugated to 96\hat{ }2=9,216 unique merged barcodes.

[0236] FIG. 22 shows the simplified design of the optically barcoded mRNA capture beads for the merged barcode. Unlike the previously-described dual barcode embodiments, there is only one cell-identifying barcode located upstream of the oligo(dT) mRNA capture site. This merged barcode contains a unique combination of multiple sequence blocks.

[0237] As illustrated in FIG. 22, we have N sets of M DNA sequences from which the N sequence blocks on each bead are generated, and one DNA sequence from each set is concatenated to form a unique barcode for each bead. For example, if there were three sets of 24 DNA sequences, one could generate 243=13,824 unique barcodes. These barcodes can be demultiplexed optically using sequential fluorescence hybridization just as in the previous implementation with a few practical modifications.

[0238] FIG. 23 illustrates an approach for optical demultiplexing of the beads illustrated in FIG. 22. In this scheme, the barcode is comprised of three concatenated sequence blocks (so N=3) and there are four sequences in each block (so M=4). For each of the three blocks, we introduce two mixtures of two probes to identify which of the four sequences are present in the block. For example, for the first block, first a mixture is introduced containing fluorescent probes that are complementary to sequences 1 and 2. Then a mixture is introduced containing fluorescent probes that are complementary to sequences 1 and 3. If sequence 3 is actually present on the bead, then the first mixture will give a negative result and the second will give a positive result. This outcome is unique to a bead harboring sequence 3 in its first block. This procedure is then repeat to identify the sequences in the remaining two blocks.

[0239] Optical demultiplexing of beads with the barcode format described in FIG. 22 and the readout method schematized in FIG. 23 is demonstrated. This approach avoids fluorescently labeling the large number of complementary probes directly. Instead, a universal sequence is included attached to each complementary probe that hybridizes to a universal fluorescently labeled oligonucleotide. This allows use of the same fluorescently labeled oligonucleotide to make all of the complementary probes fluorescent, which is highly cost effective. A representative image of fluorescence-based demultiplexing of a subset of the beads appears in FIG. 24.

[0240] In the experiment that generated FIG. 24, barcoded beads with M=2 and N=3 were used. Initially followed is the microwell array-based single-cell RNA-Seq workflow described in Yuan and Sims, Scientific Reports 6, 33883, until the on-chip reverse transcription step. After the on-chip reverse transcription step, exonuclease I digestion reaction mix (1× Exo I buffer, 1U/uL Exo I) is flowed in, and the device is incubated in a 37° C. incubator for 45 minutes. This step removes unused single-stranded capture primers that were accessible to enzymatic digestion. The device was then washed by TE/TW buffer (10 mM Tris pH8.0, 1 mM EDTA, 0.01% Tween-20). A hybridization mix (200 nM primary probe oligo, 20 mM Tris-HCl pH 7.9, 50 mM NaCl, 0.1% Tween-20) was subsequently flowed into the device and incubated for 10 minutes. The primary probe oligo is an unlabeled oligo whose sequence can be divided into two parts. One part of the oligo's sequence is complimentary to the first of the first set of two oligo sequences on the bead. The other part's sequence is complimentary to a fluorescently labeled oligo which we call read-out probe. The device is then washed with wash buffer (20 mM Tris-HCl pH7.9, 50 mM NaCl, 0.1% Tween-20) to remove any unbound oligos. The read-out probe mix (200 nM read-out probe oligo, 20 mM Tris-HCl pH 7.9, 50 mM NaCl, 0.1% Tween-20) was then flowed into the device and incubated for 10 minutes. Unbound oligos were washed out by wash buffer afterwards. The device is then scanned under a microscope through both bright field and fluorescence channel which generated images like the ones shown in FIG. 24. Beads were then extracted from the device, washed with 150 mM NaOH, pooled together for subsequent tube-based library construction steps as described previously in Yuan and Sims (2016), Scientific Reports 6, 33883.

Merged Barcode mRNA Capture Beads (M=2, N=2)

[0241] To test the merged optical barcode scheme (SCOPE-seqV2), a small-scale pool of optically barcoded mRNA capture beads were designed with two concatenated sequence blocks (N=2) with two sequences in each block (M=2). The sequence in each block was eight bases long. This results in a total of four (22=4) different bead species in the bead pool. The performance of these beads was characterized in 1) a single cell RNA-Seq experiment and 2) a fluorescence hybridization experiment.

[0242] In the single cell RNA-Seq experiment, merged optically barcoded mRNA capture beads (referred as SCOPE-SeqV2 beads) and non-optically barcoded mRNA capture beads (referred as conventional RNA-seq beads) were used to perform single cell RNA-Seq in two separate microwell array devices on approximately (<20% difference) the same number of cells sampled from the same batch of cell culture using the protocol described in Yuan et al, Scientific Reports, 2016. Pre-amplified cDNA from both experiments were quantified by fluorometer (Qubit) and capillary gel electrophoresis (Bioanalyzer, Agilent). The amount of cDNA yield and cDNA length distribution were essentially identical for cDNA obtained using both types of beads (see FIG. 25). This observation suggests that capture efficiency for single-cell RNA-seq is uncompromised by this merged optical barcoding embodiment.

[0243] In the fluorescence hybridization experiment, exonuclease-treated SCOPE-SeqV2 beads were loaded into a microwell array device. A Cy3 dye-labeled 8-mer oligonucleotide whose sequence is complimentary to one of the two sequences in the first sequence block and Cy5 dye-labeled 8-mer oligonucleotide whose sequence is complimentary to one of the two sequences in the second sequence block were simultaneously hybridized to the beads in the microwell array device. Both oligonucleotides were introduced at a concentration of 100 nM in a hybridization buffer comprised of 2×SSC (Saline Sodium Citrate) with 10% DMSO (Dimethyl sulfoxide) and an incubation time of 10 minutes. Next, excess oligonucleotides were rinsed out of the device by laminar flow of buffer. Beads in microwell array device were then imaged in the Cy3 and Cy5 excitation/emission channels with an epifluorescence microscope, and a bright field transmission image was also acquired. A multi-color composite image of the beads (FIG. 26) clearly shows that there are four optically distinct bead species (pseudo-colored as black, green, orange, and red). A scatter plot of the log 2 transformed average bead intensity in the Cy3 and Cy5 channels (FIG. 27) demonstrates high signal-to-background ratio. Four bead populations can be readily detected.

### Design Considerations for Merged Barcode Beads

[0244] In one embodiment, the length of the sequence in each merged optical barcode sequence block is long enough for stable oligonucleotide hybridization at room temperature but not too long to minimize DNA secondary structure. The formation of DNA secondary structure significantly compromises the quality of scRNA-Seq data and fluorescence hybridization-based optical demultiplexing. Typically, fluorescence probes with a length between 16 nt and 22 nt are used in fluorescence hybridization-based applications including single molecule fluorescence in situ hybridization. However, when 16 nt oligonucleotides were used in each optical barcode sequence block, scRNA-Seq data and optical demultiplexing were both significantly adversely affected. When 8 nt oligonucleotides were used in each optical barcode sequence block, uncompromised scRNA-Seq data (compared to conventional RNA-seq beads) and fluorescence hybridization signal with high signal-to-background ratio were obtained. Therefore, the length of optical barcode sequence in each block was set to be 8 nt.

[0245] To distinguish different optical barcode sequences using fluorescence hybridization, a preliminary list of 8-mer sequences was generated that are at least 3 Levenshtein distance away from each other. Any sequences that contain 3-base homopolymers or whose GC content is either <40% or >60%, or are perfectly self-complementary were filtered out. This constrains the oligonucleotide sequence space to 547 8-mer sequences (out of a possible 4\hat{ }8=65,536).

[0246] A preliminary list of full-length mRNA capture oligonucleotide sequences was then generated by combinatorically arranging these 8-mer sequences in two optical barcode oligonucleotide sequence blocks separated by two random unique molecular identifier (UMI) bases. The composition of the full-length sequence is as follows:

[00201]
TTTTTTTAAGCAGTGGTATCAACGCAGAGTACNN(8-mer Block
1)NN(8-mer Block 2)NNTTTTTTTTTTTTTTTTTTTTTTTTTTTTTT (SEQ ID NO:
9696)

[0247] The maximum length of continuous self-complimentary sequences within each full-length mRNA capture oligonucleotide sequence is calculated. The stability score of such self-complimentary structure is defined as 1.5*L_{GC}+L_{AT}. wherein L_{GC} and L_{AT} are the number of GC bases and AT bases respectively in the continuous stretch of self-complimentary sequence. The individual 8-mer sequences were then ranked in ascending order by the sum of the stability score of all full-length sequences of which it was a member. The bottom 50% of the 8-mer sequences on this ranked list was filtered out leaving 274 8-mer sequences.

[0248] Another round of filtering is performed on this list based on the melting temperature and self-dimer or cross-dimer forming potential. Any 8-mer sequences with a predicted melting temperature below 25° C. or a strong tendency to form self-dimer or cross-dimer were excluded. 11 and 17 8-mer sequences were filtered out due to low melting temperature and strong potential to form self-dimer or cross-dimer respectively leaving 246 8-mer sequences (see attached sequence listing).

[0249] The 8-mer sequences also need to be highly distinct from the universal sequence adapters at the base of each bead (TTTTTTTAAGCAGTGGTATCAACGCAGAGTAC) (SEQ ID NO: 9697)). The local alignment scores between all remaining 8-mer sequences and the universal sequence were calculated. The remaining 8-mer sequences were then ranked based on this local alignment score in ascending order. The top 96 8-mer sequences were used in the first optical barcode oligonucleotide sequence block. The 97^{th} to 192^{nd} 8-mer sequences were used in the second optical barcode oligonucleotide sequence block. A final list of 9216 full-length mRNA capture oligonucleotide sequences was then generated (see attached sequence listing).

1-21. (canceled)

22. A method for single cell RNA capture and sequencing, wherein said method comprises
(a) introducing at least one cell into a microwell, wherein the microwell is attached to a first substrate that faces a second substrate and wherein oligo primers are attached to the surface of said second substrate;
(b) hybridizing mRNA molecules to the surface of said second substrate;
(c) adding at least one buffer to the microwell; and
contacting said first substrate with said second substrate, thereby creating a seal between said first substrate and said second substrate.

23. The method of claim 22, wherein said first substrate comprises a siloxane material and said second substrate comprises glass.

24. The method of claim 22, wherein said first substrate comprises polydimethylsiloxane.

25. The method of claim 22, wherein said method further comprises (e) analyzing the sealed first substrate and second substrate by microscopy or fluorescence.

26. The method of claim 22, wherein said oligo primers comprise oligo(dT) primers.

27. The method of claim 22, wherein said oligo(dT) primers are covalently attached to the surface of said second substrate such that the mRNA molecules are immobilized by hybridization of their poly(A) tails.

28. The method of claim 22, wherein said at least one buffer comprises a lysis buffer.

29-40. (canceled)

41. A plurality of oligonucleotide capture beads, each capture bead comprising a plurality of oligonucleotide sequences separately attached to an outer surface of the capture bead, wherein each oligonucleotide sequence comprises:
(a) a PCR handle attached to each capture bead, wherein the PCR handle is identical in each oligonucleotide sequence on each capture bead;
(b) a barcode attached to the PCR handle, wherein the barcode is configured for identification of the attached capture bead and associated cell, wherein the barcode comprises N blocks, wherein each block is an oligonucleotide sequence of length 8 nt to 30 nt chosen from one of N sets of M oligonucleotides, wherein N is at least 2 and M is at least 30;
(c) a unique molecular identifier (UMI) of length 6 to 16 nucleotides (nt), wherein the UMI is either (i) attached to the barcode or (ii) segments of the UMI appear before or between or after the blocks of oligonucleotides, wherein the UMI may differ between oligonucleotide sequences on the capture bead, and wherein the UMI may differ between different capture beads; and
(d) an oligo(dT) attached to the UMI.

42. The plurality of oligonucleotide capture beads of claim 41, wherein N is 2 and M is 96.

43. The plurality of oligonucleotide capture beads of claim 41, wherein the UMI is of length 6 nt to 10 nt.

44. The plurality of oligonucleotide capture beads of any one of claim 41, wherein the UMI is of length 6 nt.

45-54. (canceled)

55. A method for demultiplexing capture bead barcodes using sequential label hybridization, wherein said method comprises:
(a) introducing into a plurality of microwells at least one cell and one capture bead, wherein the capture bead comprises a plurality of oligonucleotide sequences attached thereto, and wherein each oligonucleotide sequence comprises:
i) a PCR handle identical in each oligonucleotide sequence on each capture bead,
ii) a barcode configured for identification of the attached capture bead and an associated cell, wherein the barcode comprises N blocks, wherein each block is an oligonucleotide sequence of length 8 nt to 30 nt chosen from one of N unique sets of M oligonucleotide sequences, wherein N is at least 2 and M is at least 30, wherein said barcode is identifiable by sequential label hybridization;
iii) a unique molecular identifier (UMI); and
iv) an oligo(dT);
(b) adding a lysis buffer to the microwells, capturing RNA from said at least one cell onto the capture bead, and reverse transcribing; and
(c) optically demultiplexing the capture bead barcodes using sequential label hybridization, wherein the sequential label hybridization comprises sequentially introducing mixtures of labeled oligonucleotide probes into the microwells, wherein:
i) each of said probes is complementary to one of the oligonucleotide sequences in the unique sets of M oligonucleotide sequences,
ii) said mixtures each comprise at least two probes which are complementary to oligonucleotides sequences within the same unique set of M oligonucleotide sequences, and
iii) the label for each of said at least two probes complementary to oligonucleotide sequences within the same unique set of M oligonucleotide sequences is a universal labeled oligonucleotide hybridized to a universal sequence included in said probes,
wherein a direct association is provided between phenotypic imaging information acquired from the single cells while located within the microwell and sequence data acquired from the captured and reverse transcribed cellular mRNA.

56. The method of claim 55, wherein N is 2 and M is 96.

57. The method of claim 55, wherein the UMI is of length 6 nt.

58. The method of claim 55, wherein said at least one cell is only one cell in each microwell.

59. The method of claim 58, further comprising, prior to step b), imaging said only one cell in each of said microwells to generate phenotypic imaging information.

60. The method of claim 59, wherein said reverse transcribing generates cDNA, and the method further comprises treating said cDNA to generate a sequencing library.

61. The method of claim 60, further comprising sequencing said sequencing library to generate sequence data.

62. The method of claim 61, wherein said optically demultiplexing the capture bead barcodes generates optical barcode data.

63. The method of claim 62, further comprising linking said sequence data to said phenotypic imaging information using said optical barcode data.

The application's sequence listing, which the Patent Office published only in electronic form, follows.

SEQUENCE LISTING (9696 sequences)

SEQ ID NO: 1-247 - skipped (247 entries)

SEQ ID NO: 248 - DNA, 84 bp, synthetic construct
  source 1..84: mol_type = other DNA
tttttttaagcagtggtatcaacgcagagtacnngattggagnnaatcggcanntttttttttttttttttttttttttttttt

SEQ ID NO: 249 - DNA, 84 bp, synthetic construct
  source 1..84: mol_type = other DNA
tttttttaagcagtggtatcaacgcagagtacnngattggagnntacggcatnntttttttttttttttttttttttttttttt

SEQ ID NO: 250 - DNA, 84 bp, synthetic construct
  source 1..84: mol_type = other DNA
tttttttaagcagtggtatcaacgcagagtacnngattggagnnttggatcgnntttttttttttttttttttttttttttttt

SEQ ID NO: 251 - DNA, 84 bp, synthetic construct
  source 1..84: mol_type = other DNA
tttttttaagcagtggtatcaacgcagagtacnngattggagnntggaacganntttttttttttttttttttttttttttttt

SEQ ID NO: 252 - DNA, 84 bp, synthetic construct
  source 1..84: mol_type = other DNA
tttttttaagcagtggtatcaacgcagagtacnngattggagnnggcaatcanntttttttttttttttttttttttttttttt

SEQ ID NO: 253 - DNA, 84 bp, synthetic construct
  source 1..84: mol_type = other DNA
tttttttaagcagtggtatcaacgcagagtacnngattggagnngaatccganntttttttttttttttttttttttttttttt

SEQ ID NO: 254 - DNA, 84 bp, synthetic construct
  source 1..84: mol_type = other DNA
tttttttaagcagtggtatcaacgcagagtacnngattggagnnttacggtgnntttttttttttttttttttttttttttttt

SEQ ID NO: 255 - DNA, 84 bp, synthetic construct
  source 1..84: mol_type = other DNA
tttttttaagcagtggtatcaacgcagagtacnngattggagnncatatcggnntttttttttttttttttttttttttttttt

SEQ ID NO: 256 - DNA, 84 bp, synthetic construct
  source 1..84: mol_type = other DNA
tttttttaagcagtggtatcaacgcagagtacnngattggagnncttcggtanntttttttttttttttttttttttttttttt

SEQ ID NO: 257 - DNA, 84 bp, synthetic construct
  source 1..84: mol_type = other DNA
tttttttaagcagtggtatcaacgcagagtacnngattggagnntcctaacgnntttttttttttttttttttttttttttttt

SEQ ID NO: 258 - DNA, 84 bp, synthetic construct
  source 1..84: mol_type = other DNA
tttttttaagcagtggtatcaacgcagagtacnngattggagnngtaagccanntttttttttttttttttttttttttttttt

SEQ ID NO: 259 - DNA, 84 bp, synthetic construct
  source 1..84: mol_type = other DNA
tttttttaagcagtggtatcaacgcagagtacnngattggagnntaaggtggnntttttttttttttttttttttttttttttt

SEQ ID NO: 260 - DNA, 84 bp, synthetic construct
  source 1..84: mol_type = other DNA
tttttttaagcagtggtatcaacgcagagtacnngattggagnnggtaagctnntttttttttttttttttttttttttttttt

SEQ ID NO: 261 - DNA, 84 bp, synthetic construct
  source 1..84: mol_type = other DNA
tttttttaagcagtggtatcaacgcagagtacnngattggagnntgtgtcganntttttttttttttttttttttttttttttt

SEQ ID NO: 262 - DNA, 84 bp, synthetic construct
  source 1..84: mol_type = other DNA
tttttttaagcagtggtatcaacgcagagtacnngattggagnngagcatganntttttttttttttttttttttttttttttt

SEQ ID NO: 263 - DNA, 84 bp, synthetic construct
  source 1..84: mol_type = other DNA
tttttttaagcagtggtatcaacgcagagtacnngattggagnntcgaagtcnntttttttttttttttttttttttttttttt

SEQ ID NO: 264 - DNA, 84 bp, synthetic construct
  source 1..84: mol_type = other DNA
tttttttaagcagtggtatcaacgcagagtacnngattggagnnggtgaacanntttttttttttttttttttttttttttttt

SEQ ID NO: 265 - DNA, 84 bp, synthetic construct
  source 1..84: mol_type = other DNA
tttttttaagcagtggtatcaacgcagagtacnngattggagnnacatgcacnntttttttttttttttttttttttttttttt

SEQ ID NO: 266 - DNA, 84 bp, synthetic construct
  source 1..84: mol_type = other DNA
tttttttaagcagtggtatcaacgcagagtacnngattggagnnccaacagtnntttttttttttttttttttttttttttttt

SEQ ID NO: 267 - DNA, 84 bp, synthetic construct
  source 1..84: mol_type = other DNA
tttttttaagcagtggtatcaacgcagagtacnngattggagnnagaacagcnntttttttttttttttttttttttttttttt

SEQ ID NO: 268 - DNA, 84 bp, synthetic construct
  source 1..84: mol_type = other DNA
tttttttaagcagtggtatcaacgcagagtacnngattggagnngaacacgtnntttttttttttttttttttttttttttttt

SEQ ID NO: 269 - DNA, 84 bp, synthetic construct
  source 1..84: mol_type = other DNA
tttttttaagcagtggtatcaacgcagagtacnngattggagnnggtcttcanntttttttttttttttttttttttttttttt

SEQ ID NO: 270 - DNA, 84 bp, synthetic construct
  source 1..84: mol_type = other DNA
tttttttaagcagtggtatcaacgcagagtacnngattggagnnaggttcagnntttttttttttttttttttttttttttttt

SEQ ID NO: 271 - DNA, 84 bp, synthetic construct
  source 1..84: mol_type = other DNA
tttttttaagcagtggtatcaacgcagagtacnngattggagnnctagagcanntttttttttttttttttttttttttttttt

SEQ ID NO: 272 - DNA, 84 bp, synthetic construct
  source 1..84: mol_type = other DNA
tttttttaagcagtggtatcaacgcagagtacnngattggagnncttctagcnntttttttttttttttttttttttttttttt

SEQ ID NO: 273 - DNA, 84 bp, synthetic construct
  source 1..84: mol_type = other DNA
tttttttaagcagtggtatcaacgcagagtacnngattggagnngagtaacgnntttttttttttttttttttttttttttttt

SEQ ID NO: 274 - DNA, 84 bp, synthetic construct
  source 1..84: mol_type = other DNA
tttttttaagcagtggtatcaacgcagagtacnngattggagnnctaagaggnntttttttttttttttttttttttttttttt

SEQ ID NO: 275 - DNA, 84 bp, synthetic construct
  source 1..84: mol_type = other DNA
tttttttaagcagtggtatcaacgcagagtacnngattggagnnacgtgtagnntttttttttttttttttttttttttttttt

SEQ ID NO: 276 - DNA, 84 bp, synthetic construct
  source 1..84: mol_type = other DNA
tttttttaagcagtggtatcaacgcagagtacnngattggagnnactacaggnntttttttttttttttttttttttttttttt

SEQ ID NO: 277 - DNA, 84 bp, synthetic construct
  source 1..84: mol_type = other DNA
tttttttaagcagtggtatcaacgcagagtacnngattggagnntacaggtcnntttttttttttttttttttttttttttttt

SEQ ID NO: 278 - DNA, 84 bp, synthetic construct
  source 1..84: mol_type = other DNA
tttttttaagcagtggtatcaacgcagagtacnngattggagnnctcacatgnntttttttttttttttttttttttttttttt

SEQ ID NO: 279 - DNA, 84 bp, synthetic construct
  source 1..84: mol_type = other DNA
tttttttaagcagtggtatcaacgcagagtacnngattggagnnactaggagnntttttttttttttttttttttttttttttt

SEQ ID NO: 280 - DNA, 84 bp, synthetic construct
  source 1..84: mol_type = other DNA
tttttttaagcagtggtatcaacgcagagtacnngattggagnnccatagganntttttttttttttttttttttttttttttt

SEQ ID NO: 281 - DNA, 84 bp, synthetic construct
  source 1..84: mol_type = other DNA
tttttttaagcagtggtatcaacgcagagtacnngattggagnnggagaatcnntttttttttttttttttttttttttttttt

SEQ ID NO: 282 - DNA, 84 bp, synthetic construct
  source 1..84: mol_type = other DNA
tttttttaagcagtggtatcaacgcagagtacnngattggagnngccaagaanntttttttttttttttttttttttttttttt

SEQ ID NO: 283 - DNA, 84 bp, synthetic construct
  source 1..84: mol_type = other DNA
tttttttaagcagtggtatcaacgcagagtacnngattggagnnaaggcaagnntttttttttttttttttttttttttttttt

SEQ ID NO: 284 - DNA, 84 bp, synthetic construct
  source 1..84: mol_type = other DNA
tttttttaagcagtggtatcaacgcagagtacnngattggagnnaatgtcgcnntttttttttttttttttttttttttttttt

SEQ ID NO: 285 - DNA, 84 bp, synthetic construct
  source 1..84: mol_type = other DNA
tttttttaagcagtggtatcaacgcagagtacnngattggagnnatggaaccnntttttttttttttttttttttttttttttt

SEQ ID NO: 286 - DNA, 84 bp, synthetic construct
  source 1..84: mol_type = other DNA
tttttttaagcagtggtatcaacgcagagtacnngattggagnnagaggcatnntttttttttttttttttttttttttttttt

SEQ ID NO: 287 - DNA, 84 bp, synthetic construct
  source 1..84: mol_type = other DNA
tttttttaagcagtggtatcaacgcagagtacnngattggagnntgcatagcnntttttttttttttttttttttttttttttt

SEQ ID NO: 288 - DNA, 84 bp, synthetic construct
  source 1..84: mol_type = other DNA
tttttttaagcagtggtatcaacgcagagtacnngattggagnnctaacgganntttttttttttttttttttttttttttttt

SEQ ID NO: 289 - DNA, 84 bp, synthetic construct
  source 1..84: mol_type = other DNA
tttttttaagcagtggtatcaacgcagagtacnngattggagnntatcgaggnntttttttttttttttttttttttttttttt

SEQ ID NO: 290 - DNA, 84 bp, synthetic construct
  source 1..84: mol_type = other DNA
tttttttaagcagtggtatcaacgcagagtacnngattggagnncatagcctnntttttttttttttttttttttttttttttt

SEQ ID NO: 291 - DNA, 84 bp, synthetic construct
  source 1..84: mol_type = other DNA
tttttttaagcagtggtatcaacgcagagtacnngattggagnnatcgagacnntttttttttttttttttttttttttttttt

SEQ ID NO: 292 - DNA, 84 bp, synthetic construct
  source 1..84: mol_type = other DNA
tttttttaagcagtggtatcaacgcagagtacnngattggagnnggaagagtnntttttttttttttttttttttttttttttt

SEQ ID NO: 293 - DNA, 84 bp, synthetic construct
  source 1..84: mol_type = other DNA
tttttttaagcagtggtatcaacgcagagtacnngattggagnnccaagtagnntttttttttttttttttttttttttttttt

SEQ ID NO: 294 - DNA, 84 bp, synthetic construct
  source 1..84: mol_type = other DNA
tttttttaagcagtggtatcaacgcagagtacnngattggagnnctgaacagnntttttttttttttttttttttttttttttt

SEQ ID NO: 295 - DNA, 84 bp, synthetic construct
  source 1..84: mol_type = other DNA
tttttttaagcagtggtatcaacgcagagtacnngattggagnngtaggttcnntttttttttttttttttttttttttttttt

SEQ ID NO: 296 - DNA, 84 bp, synthetic construct
  source 1..84: mol_type = other DNA
tttttttaagcagtggtatcaacgcagagtacnngattggagnngtatggacnntttttttttttttttttttttttttttttt

SEQ ID NO: 297 - DNA, 84 bp, synthetic construct
  source 1..84: mol_type = other DNA
tttttttaagcagtggtatcaacgcagagtacnngattggagnntcgcaacanntttttttttttttttttttttttttttttt

SEQ ID NO: 298 - DNA, 84 bp, synthetic construct
  source 1..84: mol_type = other DNA
tttttttaagcagtggtatcaacgcagagtacnngattggagnnccgctaatnntttttttttttttttttttttttttttttt

SEQ ID NO: 299 - DNA, 84 bp, synthetic construct
  source 1..84: mol_type = other DNA
tttttttaagcagtggtatcaacgcagagtacnngattggagnngattcgcanntttttttttttttttttttttttttttttt

SEQ ID NO: 300 - DNA, 84 bp, synthetic construct
  source 1..84: mol_type = other DNA
tttttttaagcagtggtatcaacgcagagtacnngattggagnncgatggaanntttttttttttttttttttttttttttttt

SEQ ID NO: 301 - DNA, 84 bp, synthetic construct
  source 1..84: mol_type = other DNA
tttttttaagcagtggtatcaacgcagagtacnngattggagnnagcaagganntttttttttttttttttttttttttttttt

SEQ ID NO: 302 - DNA, 84 bp, synthetic construct
  source 1..84: mol_type = other DNA
tttttttaagcagtggtatcaacgcagagtacnngattggagnncgtagcaanntttttttttttttttttttttttttttttt

SEQ ID NO: 303 - DNA, 84 bp, synthetic construct
  source 1..84: mol_type = other DNA
tttttttaagcagtggtatcaacgcagagtacnngattggagnntggcagtanntttttttttttttttttttttttttttttt

SEQ ID NO: 304 - DNA, 84 bp, synthetic construct
  source 1..84: mol_type = other DNA
tttttttaagcagtggtatcaacgcagagtacnngattggagnncggtagttnntttttttttttttttttttttttttttttt

SEQ ID NO: 305 - DNA, 84 bp, synthetic construct
  source 1..84: mol_type = other DNA
tttttttaagcagtggtatcaacgcagagtacnngattggagnntgacttcgnntttttttttttttttttttttttttttttt

SEQ ID NO: 306 - DNA, 84 bp, synthetic construct
  source 1..84: mol_type = other DNA
tttttttaagcagtggtatcaacgcagagtacnngattggagnngagtgcaanntttttttttttttttttttttttttttttt

SEQ ID NO: 307 - DNA, 84 bp, synthetic construct
  source 1..84: mol_type = other DNA
tttttttaagcagtggtatcaacgcagagtacnngattggagnnacggtaacnntttttttttttttttttttttttttttttt

SEQ ID NO: 308 - DNA, 84 bp, synthetic construct
  source 1..84: mol_type = other DNA
tttttttaagcagtggtatcaacgcagagtacnngattggagnnaagtggtgnntttttttttttttttttttttttttttttt

SEQ ID NO: 309 - DNA, 84 bp, synthetic construct
  source 1..84: mol_type = other DNA
tttttttaagcagtggtatcaacgcagagtacnngattggagnnggagacaanntttttttttttttttttttttttttttttt

SEQ ID NO: 310 - DNA, 84 bp, synthetic construct
  source 1..84: mol_type = other DNA
tttttttaagcagtggtatcaacgcagagtacnngattggagnntcaaggacnntttttttttttttttttttttttttttttt

SEQ ID NO: 311 - DNA, 84 bp, synthetic construct
  source 1..84: mol_type = other DNA
tttttttaagcagtggtatcaacgcagagtacnngattggagnnaagagagcnntttttttttttttttttttttttttttttt

SEQ ID NO: 312 - DNA, 84 bp, synthetic construct
  source 1..84: mol_type = other DNA
tttttttaagcagtggtatcaacgcagagtacnngattggagnncgagagatnntttttttttttttttttttttttttttttt

SEQ ID NO: 313 - DNA, 84 bp, synthetic construct
  source 1..84: mol_type = other DNA
tttttttaagcagtggtatcaacgcagagtacnngattggagnnacagatggnntttttttttttttttttttttttttttttt

SEQ ID NO: 314 - DNA, 84 bp, synthetic construct
  source 1..84: mol_type = other DNA
tttttttaagcagtggtatcaacgcagagtacnngattggagnnaggagtcanntttttttttttttttttttttttttttttt

SEQ ID NO: 315 - DNA, 84 bp, synthetic construct
  source 1..84: mol_type = other DNA
tttttttaagcagtggtatcaacgcagagtacnngattggagnncgtgttacnntttttttttttttttttttttttttttttt

SEQ ID NO: 316 - DNA, 84 bp, synthetic construct
  source 1..84: mol_type = other DNA
tttttttaagcagtggtatcaacgcagagtacnngattggagnntagtgtgcnntttttttttttttttttttttttttttttt

SEQ ID NO: 317 - DNA, 84 bp, synthetic construct
  source 1..84: mol_type = other DNA
tttttttaagcagtggtatcaacgcagagtacnngattggagnnctcatgacnntttttttttttttttttttttttttttttt

SEQ ID NO: 318 - DNA, 84 bp, synthetic construct
  source 1..84: mol_type = other DNA
tttttttaagcagtggtatcaacgcagagtacnngattggagnngtatccagnntttttttttttttttttttttttttttttt

SEQ ID NO: 319 - DNA, 84 bp, synthetic construct
  source 1..84: mol_type = other DNA
tttttttaagcagtggtatcaacgcagagtacnngattggagnnacgcctatnntttttttttttttttttttttttttttttt

SEQ ID NO: 320 - DNA, 84 bp, synthetic construct
  source 1..84: mol_type = other DNA
tttttttaagcagtggtatcaacgcagagtacnngattggagnnaacgacctnntttttttttttttttttttttttttttttt

SEQ ID NO: 321 - DNA, 84 bp, synthetic construct
  source 1..84: mol_type = other DNA
tttttttaagcagtggtatcaacgcagagtacnngattggagnnatcaggctnntttttttttttttttttttttttttttttt

SEQ ID NO: 322 - DNA, 84 bp, synthetic construct
  source 1..84: mol_type = other DNA
tttttttaagcagtggtatcaacgcagagtacnngattggagnncaagttcgnntttttttttttttttttttttttttttttt

SEQ ID NO: 323 - DNA, 84 bp, synthetic construct
  source 1..84: mol_type = other DNA
tttttttaagcagtggtatcaacgcagagtacnngattggagnntagccaganntttttttttttttttttttttttttttttt

SEQ ID NO: 324 - DNA, 84 bp, synthetic construct
  source 1..84: mol_type = other DNA
tttttttaagcagtggtatcaacgcagagtacnngattggagnncaatcacgnntttttttttttttttttttttttttttttt

SEQ ID NO: 325 - DNA, 84 bp, synthetic construct
  source 1..84: mol_type = other DNA
tttttttaagcagtggtatcaacgcagagtacnngattggagnngcaacaagnntttttttttttttttttttttttttttttt

SEQ ID NO: 326 - DNA, 84 bp, synthetic construct
  source 1..84: mol_type = other DNA
tttttttaagcagtggtatcaacgcagagtacnngattggagnncacgacaanntttttttttttttttttttttttttttttt

SEQ ID NO: 327 - DNA, 84 bp, synthetic construct
  source 1..84: mol_type = other DNA
tttttttaagcagtggtatcaacgcagagtacnngattggagnntacggaganntttttttttttttttttttttttttttttt

SEQ ID NO: 328 - DNA, 84 bp, synthetic construct
  source 1..84: mol_type = other DNA
tttttttaagcagtggtatcaacgcagagtacnngattggagnncgacaaganntttttttttttttttttttttttttttttt

SEQ ID NO: 329 - DNA, 84 bp, synthetic construct
  source 1..84: mol_type = other DNA
tttttttaagcagtggtatcaacgcagagtacnngattggagnncgaagtganntttttttttttttttttttttttttttttt

SEQ ID NO: 330 - DNA, 84 bp, synthetic construct
  source 1..84: mol_type = other DNA
tttttttaagcagtggtatcaacgcagagtacnngattggagnnagctggtanntttttttttttttttttttttttttttttt

SEQ ID NO: 331 - DNA, 84 bp, synthetic construct
  source 1..84: mol_type = other DNA
tttttttaagcagtggtatcaacgcagagtacnngattggagnnaactaggcnntttttttttttttttttttttttttttttt

SEQ ID NO: 332 - DNA, 84 bp, synthetic construct
  source 1..84: mol_type = other DNA
tttttttaagcagtggtatcaacgcagagtacnngattggagnncagcaagtnntttttttttttttttttttttttttttttt

SEQ ID NO: 333 - DNA, 84 bp, synthetic construct
  source 1..84: mol_type = other DNA
tttttttaagcagtggtatcaacgcagagtacnngattggagnnacgaggtanntttttttttttttttttttttttttttttt

SEQ ID NO: 334 - DNA, 84 bp, synthetic construct
  source 1..84: mol_type = other DNA
tttttttaagcagtggtatcaacgcagagtacnngattggagnncatcttccnntttttttttttttttttttttttttttttt

SEQ ID NO: 335 - DNA, 84 bp, synthetic construct
  source 1..84: mol_type = other DNA
tttttttaagcagtggtatcaacgcagagtacnngattggagnncctgaatcnntttttttttttttttttttttttttttttt

SEQ ID NO: 336 - DNA, 84 bp, synthetic construct
  source 1..84: mol_type = other DNA
tttttttaagcagtggtatcaacgcagagtacnngattggagnntgcagactnntttttttttttttttttttttttttttttt

SEQ ID NO: 337 - DNA, 84 bp, synthetic construct
  source 1..84: mol_type = other DNA
tttttttaagcagtggtatcaacgcagagtacnngattggagnnagatgtggnntttttttttttttttttttttttttttttt

SEQ ID NO: 338 - DNA, 84 bp, synthetic construct
  source 1..84: mol_type = other DNA
tttttttaagcagtggtatcaacgcagagtacnngattggagnnagttcgacnntttttttttttttttttttttttttttttt

SEQ ID NO: 339 - DNA, 84 bp, synthetic construct
  source 1..84: mol_type = other DNA
tttttttaagcagtggtatcaacgcagagtacnngattggagnnacaacctcnntttttttttttttttttttttttttttttt

SEQ ID NO: 340 - DNA, 84 bp, synthetic construct
  source 1..84: mol_type = other DNA
tttttttaagcagtggtatcaacgcagagtacnngattggagnncatggtagnntttttttttttttttttttttttttttttt

SEQ ID NO: 341 - DNA, 84 bp, synthetic construct
  source 1..84: mol_type = other DNA
tttttttaagcagtggtatcaacgcagagtacnngattggagnncgtatctcnntttttttttttttttttttttttttttttt

SEQ ID NO: 342 - DNA, 84 bp, synthetic construct
  source 1..84: mol_type = other DNA
tttttttaagcagtggtatcaacgcagagtacnngattggagnncctagttcnntttttttttttttttttttttttttttttt

SEQ ID NO: 343 - DNA, 84 bp, synthetic construct
  source 1..84: mol_type = other DNA
tttttttaagcagtggtatcaacgcagagtacnngattggagnncaagagtcnntttttttttttttttttttttttttttttt

SEQ ID NO: 344 - DNA, 84 bp, synthetic construct
  source 1..84: mol_type = other DNA
tttttttaagcagtggtatcaacgcagagtacnnggatgaagnnaatcggcanntttttttttttttttttttttttttttttt

SEQ ID NO: 345 - DNA, 84 bp, synthetic construct
  source 1..84: mol_type = other DNA
tttttttaagcagtggtatcaacgcagagtacnnggatgaagnntacggcatnntttttttttttttttttttttttttttttt

SEQ ID NO: 346 - DNA, 84 bp, synthetic construct
  source 1..84: mol_type = other DNA
tttttttaagcagtggtatcaacgcagagtacnnggatgaagnnttggatcgnntttttttttttttttttttttttttttttt

SEQ ID NO: 347 - DNA, 84 bp, synthetic construct
  source 1..84: mol_type = other DNA
tttttttaagcagtggtatcaacgcagagtacnnggatgaagnntggaacganntttttttttttttttttttttttttttttt

SEQ ID NO: 348 - DNA, 84 bp, synthetic construct
  source 1..84: mol_type = other DNA
tttttttaagcagtggtatcaacgcagagtacnnggatgaagnnggcaatcanntttttttttttttttttttttttttttttt

SEQ ID NO: 349 - DNA, 84 bp, synthetic construct
  source 1..84: mol_type = other DNA
tttttttaagcagtggtatcaacgcagagtacnnggatgaagnngaatccganntttttttttttttttttttttttttttttt

SEQ ID NO: 350 - DNA, 84 bp, synthetic construct
  source 1..84: mol_type = other DNA
tttttttaagcagtggtatcaacgcagagtacnnggatgaagnnttacggtgnntttttttttttttttttttttttttttttt

SEQ ID NO: 351 - DNA, 84 bp, synthetic construct
  source 1..84: mol_type = other DNA
tttttttaagcagtggtatcaacgcagagtacnnggatgaagnncatatcggnntttttttttttttttttttttttttttttt

SEQ ID NO: 352 - DNA, 84 bp, synthetic construct
  source 1..84: mol_type = other DNA
tttttttaagcagtggtatcaacgcagagtacnnggatgaagnncttcggtanntttttttttttttttttttttttttttttt

SEQ ID NO: 353 - DNA, 84 bp, synthetic construct
  source 1..84: mol_type = other DNA
tttttttaagcagtggtatcaacgcagagtacnnggatgaagnntcctaacgnntttttttttttttttttttttttttttttt

SEQ ID NO: 354 - DNA, 84 bp, synthetic construct
  source 1..84: mol_type = other DNA
tttttttaagcagtggtatcaacgcagagtacnnggatgaagnngtaagccanntttttttttttttttttttttttttttttt

SEQ ID NO: 355 - DNA, 84 bp, synthetic construct
  source 1..84: mol_type = other DNA
tttttttaagcagtggtatcaacgcagagtacnnggatgaagnntaaggtggnntttttttttttttttttttttttttttttt

SEQ ID NO: 356 - DNA, 84 bp, synthetic construct
  source 1..84: mol_type = other DNA
tttttttaagcagtggtatcaacgcagagtacnnggatgaagnnggtaagctnntttttttttttttttttttttttttttttt

SEQ ID NO: 357 - DNA, 84 bp, synthetic construct
  source 1..84: mol_type = other DNA
tttttttaagcagtggtatcaacgcagagtacnnggatgaagnntgtgtcganntttttttttttttttttttttttttttttt

SEQ ID NO: 358 - DNA, 84 bp, synthetic construct
  source 1..84: mol_type = other DNA
tttttttaagcagtggtatcaacgcagagtacnnggatgaagnngagcatganntttttttttttttttttttttttttttttt

SEQ ID NO: 359 - DNA, 84 bp, synthetic construct
  source 1..84: mol_type = other DNA
tttttttaagcagtggtatcaacgcagagtacnnggatgaagnntcgaagtcnntttttttttttttttttttttttttttttt

SEQ ID NO: 360 - DNA, 84 bp, synthetic construct
  source 1..84: mol_type = other DNA
tttttttaagcagtggtatcaacgcagagtacnnggatgaagnnggtgaacanntttttttttttttttttttttttttttttt

SEQ ID NO: 361 - DNA, 84 bp, synthetic construct
  source 1..84: mol_type = other DNA
tttttttaagcagtggtatcaacgcagagtacnnggatgaagnnacatgcacnntttttttttttttttttttttttttttttt

SEQ ID NO: 362 - DNA, 84 bp, synthetic construct
  source 1..84: mol_type = other DNA
tttttttaagcagtggtatcaacgcagagtacnnggatgaagnnccaacagtnntttttttttttttttttttttttttttttt

SEQ ID NO: 363 - DNA, 84 bp, synthetic construct
  source 1..84: mol_type = other DNA
tttttttaagcagtggtatcaacgcagagtacnnggatgaagnnagaacagcnntttttttttttttttttttttttttttttt

SEQ ID NO: 364 - DNA, 84 bp, synthetic construct
  source 1..84: mol_type = other DNA
tttttttaagcagtggtatcaacgcagagtacnnggatgaagnngaacacgtnntttttttttttttttttttttttttttttt

SEQ ID NO: 365 - DNA, 84 bp, synthetic construct
  source 1..84: mol_type = other DNA
tttttttaagcagtggtatcaacgcagagtacnnggatgaagnnggtcttcanntttttttttttttttttttttttttttttt

SEQ ID NO: 366 - DNA, 84 bp, synthetic construct
  source 1..84: mol_type = other DNA
tttttttaagcagtggtatcaacgcagagtacnnggatgaagnnaggttcagnntttttttttttttttttttttttttttttt

SEQ ID NO: 367 - DNA, 84 bp, synthetic construct
  source 1..84: mol_type = other DNA
tttttttaagcagtggtatcaacgcagagtacnnggatgaagnnctagagcanntttttttttttttttttttttttttttttt

SEQ ID NO: 368 - DNA, 84 bp, synthetic construct
  source 1..84: mol_type = other DNA
tttttttaagcagtggtatcaacgcagagtacnnggatgaagnncttctagcnntttttttttttttttttttttttttttttt

SEQ ID NO: 369 - DNA, 84 bp, synthetic construct
  source 1..84: mol_type = other DNA
tttttttaagcagtggtatcaacgcagagtacnnggatgaagnngagtaacgnntttttttttttttttttttttttttttttt

SEQ ID NO: 370 - DNA, 84 bp, synthetic construct
  source 1..84: mol_type = other DNA
tttttttaagcagtggtatcaacgcagagtacnnggatgaagnnctaagaggnntttttttttttttttttttttttttttttt

SEQ ID NO: 371 - DNA, 84 bp, synthetic construct
  source 1..84: mol_type = other DNA
tttttttaagcagtggtatcaacgcagagtacnnggatgaagnnacgtgtagnntttttttttttttttttttttttttttttt

SEQ ID NO: 372 - DNA, 84 bp, synthetic construct
  source 1..84: mol_type = other DNA
tttttttaagcagtggtatcaacgcagagtacnnggatgaagnnactacaggnntttttttttttttttttttttttttttttt

SEQ ID NO: 373 - DNA, 84 bp, synthetic construct
  source 1..84: mol_type = other DNA
tttttttaagcagtggtatcaacgcagagtacnnggatgaagnntacaggtcnntttttttttttttttttttttttttttttt

SEQ ID NO: 374 - DNA, 84 bp, synthetic construct
  source 1..84: mol_type = other DNA
tttttttaagcagtggtatcaacgcagagtacnnggatgaagnnctcacatgnntttttttttttttttttttttttttttttt

SEQ ID NO: 375 - DNA, 84 bp, synthetic construct
  source 1..84: mol_type = other DNA
tttttttaagcagtggtatcaacgcagagtacnnggatgaagnnactaggagnntttttttttttttttttttttttttttttt

SEQ ID NO: 376 - DNA, 84 bp, synthetic construct
  source 1..84: mol_type = other DNA
tttttttaagcagtggtatcaacgcagagtacnnggatgaagnnccatagganntttttttttttttttttttttttttttttt

SEQ ID NO: 377 - DNA, 84 bp, synthetic construct
  source 1..84: mol_type = other DNA
tttttttaagcagtggtatcaacgcagagtacnnggatgaagnnggagaatcnntttttttttttttttttttttttttttttt

SEQ ID NO: 378 - DNA, 84 bp, synthetic construct
  source 1..84: mol_type = other DNA
tttttttaagcagtggtatcaacgcagagtacnnggatgaagnngccaagaanntttttttttttttttttttttttttttttt

SEQ ID NO: 379 - DNA, 84 bp, synthetic construct
  source 1..84: mol_type = other DNA
tttttttaagcagtggtatcaacgcagagtacnnggatgaagnnaaggcaagnntttttttttttttttttttttttttttttt

SEQ ID NO: 380 - DNA, 84 bp, synthetic construct
  source 1..84: mol_type = other DNA
tttttttaagcagtggtatcaacgcagagtacnnggatgaagnnaatgtcgcnntttttttttttttttttttttttttttttt

SEQ ID NO: 381 - DNA, 84 bp, synthetic construct
  source 1..84: mol_type = other DNA
tttttttaagcagtggtatcaacgcagagtacnnggatgaagnnatggaaccnntttttttttttttttttttttttttttttt

SEQ ID NO: 382 - DNA, 84 bp, synthetic construct
  source 1..84: mol_type = other DNA
tttttttaagcagtggtatcaacgcagagtacnnggatgaagnnagaggcatnntttttttttttttttttttttttttttttt

SEQ ID NO: 383 - DNA, 84 bp, synthetic construct
  source 1..84: mol_type = other DNA
tttttttaagcagtggtatcaacgcagagtacnnggatgaagnntgcatagcnntttttttttttttttttttttttttttttt

SEQ ID NO: 384 - DNA, 84 bp, synthetic construct
  source 1..84: mol_type = other DNA
tttttttaagcagtggtatcaacgcagagtacnnggatgaagnnctaacgganntttttttttttttttttttttttttttttt

SEQ ID NO: 385 - DNA, 84 bp, synthetic construct
  source 1..84: mol_type = other DNA
tttttttaagcagtggtatcaacgcagagtacnnggatgaagnntatcgaggnntttttttttttttttttttttttttttttt

SEQ ID NO: 386 - DNA, 84 bp, synthetic construct
  source 1..84: mol_type = other DNA
tttttttaagcagtggtatcaacgcagagtacnnggatgaagnncatagcctnntttttttttttttttttttttttttttttt

SEQ ID NO: 387 - DNA, 84 bp, synthetic construct
  source 1..84: mol_type = other DNA
tttttttaagcagtggtatcaacgcagagtacnnggatgaagnnatcgagacnntttttttttttttttttttttttttttttt

SEQ ID NO: 388 - DNA, 84 bp, synthetic construct
  source 1..84: mol_type = other DNA
tttttttaagcagtggtatcaacgcagagtacnnggatgaagnnggaagagtnntttttttttttttttttttttttttttttt

SEQ ID NO: 389 - DNA, 84 bp, synthetic construct
  source 1..84: mol_type = other DNA
tttttttaagcagtggtatcaacgcagagtacnnggatgaagnnccaagtagnntttttttttttttttttttttttttttttt

SEQ ID NO: 390 - DNA, 84 bp, synthetic construct
  source 1..84: mol_type = other DNA
tttttttaagcagtggtatcaacgcagagtacnnggatgaagnnctgaacagnntttttttttttttttttttttttttttttt

SEQ ID NO: 391 - DNA, 84 bp, synthetic construct
  source 1..84: mol_type = other DNA
tttttttaagcagtggtatcaacgcagagtacnnggatgaagnngtaggttcnntttttttttttttttttttttttttttttt

SEQ ID NO: 392 - DNA, 84 bp, synthetic construct
  source 1..84: mol_type = other DNA
tttttttaagcagtggtatcaacgcagagtacnnggatgaagnngtatggacnntttttttttttttttttttttttttttttt

SEQ ID NO: 393 - DNA, 84 bp, synthetic construct
  source 1..84: mol_type = other DNA
tttttttaagcagtggtatcaacgcagagtacnnggatgaagnntcgcaacanntttttttttttttttttttttttttttttt

SEQ ID NO: 394 - DNA, 84 bp, synthetic construct
  source 1..84: mol_type = other DNA
tttttttaagcagtggtatcaacgcagagtacnnggatgaagnnccgctaatnntttttttttttttttttttttttttttttt

SEQ ID NO: 395 - DNA, 84 bp, synthetic construct
  source 1..84: mol_type = other DNA
tttttttaagcagtggtatcaacgcagagtacnnggatgaagnngattcgcanntttttttttttttttttttttttttttttt

SEQ ID NO: 396 - DNA, 84 bp, synthetic construct
  source 1..84: mol_type = other DNA
tttttttaagcagtggtatcaacgcagagtacnnggatgaagnncgatggaanntttttttttttttttttttttttttttttt

SEQ ID NO: 397 - DNA, 84 bp, synthetic construct
  source 1..84: mol_type = other DNA
tttttttaagcagtggtatcaacgcagagtacnnggatgaagnnagcaagganntttttttttttttttttttttttttttttt

SEQ ID NO: 398 - DNA, 84 bp, synthetic construct
  source 1..84: mol_type = other DNA
tttttttaagcagtggtatcaacgcagagtacnnggatgaagnncgtagcaanntttttttttttttttttttttttttttttt

SEQ ID NO: 399 - DNA, 84 bp, synthetic construct
  source 1..84: mol_type = other DNA
tttttttaagcagtggtatcaacgcagagtacnnggatgaagnntggcagtanntttttttttttttttttttttttttttttt

SEQ ID NO: 400 - DNA, 84 bp, synthetic construct
  source 1..84: mol_type = other DNA
tttttttaagcagtggtatcaacgcagagtacnnggatgaagnncggtagttnntttttttttttttttttttttttttttttt

SEQ ID NO: 401 - DNA, 84 bp, synthetic construct
  source 1..84: mol_type = other DNA
tttttttaagcagtggtatcaacgcagagtacnnggatgaagnntgacttcgnntttttttttttttttttttttttttttttt

SEQ ID NO: 402 - DNA, 84 bp, synthetic construct
  source 1..84: mol_type = other DNA
tttttttaagcagtggtatcaacgcagagtacnnggatgaagnngagtgcaanntttttttttttttttttttttttttttttt

SEQ ID NO: 403 - DNA, 84 bp, synthetic construct
  source 1..84: mol_type = other DNA
tttttttaagcagtggtatcaacgcagagtacnnggatgaagnnacggtaacnntttttttttttttttttttttttttttttt

SEQ ID NO: 404 - DNA, 84 bp, synthetic construct
  source 1..84: mol_type = other DNA
tttttttaagcagtggtatcaacgcagagtacnnggatgaagnnaagtggtgnntttttttttttttttttttttttttttttt

SEQ ID NO: 405 - DNA, 84 bp, synthetic construct
  source 1..84: mol_type = other DNA
tttttttaagcagtggtatcaacgcagagtacnnggatgaagnnggagacaanntttttttttttttttttttttttttttttt

SEQ ID NO: 406 - DNA, 84 bp, synthetic construct
  source 1..84: mol_type = other DNA
tttttttaagcagtggtatcaacgcagagtacnnggatgaagnntcaaggacnntttttttttttttttttttttttttttttt

SEQ ID NO: 407 - DNA, 84 bp, synthetic construct
  source 1..84: mol_type = other DNA
tttttttaagcagtggtatcaacgcagagtacnnggatgaagnnaagagagcnntttttttttttttttttttttttttttttt

SEQ ID NO: 408 - DNA, 84 bp, synthetic construct
  source 1..84: mol_type = other DNA
tttttttaagcagtggtatcaacgcagagtacnnggatgaagnncgagagatnntttttttttttttttttttttttttttttt

SEQ ID NO: 409 - DNA, 84 bp, synthetic construct
  source 1..84: mol_type = other DNA
tttttttaagcagtggtatcaacgcagagtacnnggatgaagnnacagatggnntttttttttttttttttttttttttttttt

SEQ ID NO: 410 - DNA, 84 bp, synthetic construct
  source 1..84: mol_type = other DNA
tttttttaagcagtggtatcaacgcagagtacnnggatgaagnnaggagtcanntttttttttttttttttttttttttttttt

SEQ ID NO: 411 - DNA, 84 bp, synthetic construct
  source 1..84: mol_type = other DNA
tttttttaagcagtggtatcaacgcagagtacnnggatgaagnncgtgttacnntttttttttttttttttttttttttttttt

SEQ ID NO: 412 - DNA, 84 bp, synthetic construct
  source 1..84: mol_type = other DNA
tttttttaagcagtggtatcaacgcagagtacnnggatgaagnntagtgtgcnntttttttttttttttttttttttttttttt

SEQ ID NO: 413 - DNA, 84 bp, synthetic construct
  source 1..84: mol_type = other DNA
tttttttaagcagtggtatcaacgcagagtacnnggatgaagnnctcatgacnntttttttttttttttttttttttttttttt

SEQ ID NO: 414 - DNA, 84 bp, synthetic construct
  source 1..84: mol_type = other DNA
tttttttaagcagtggtatcaacgcagagtacnnggatgaagnngtatccagnntttttttttttttttttttttttttttttt

SEQ ID NO: 415 - DNA, 84 bp, synthetic construct
  source 1..84: mol_type = other DNA
tttttttaagcagtggtatcaacgcagagtacnnggatgaagnnacgcctatnntttttttttttttttttttttttttttttt

SEQ ID NO: 416 - DNA, 84 bp, synthetic construct
  source 1..84: mol_type = other DNA
tttttttaagcagtggtatcaacgcagagtacnnggatgaagnnaacgacctnntttttttttttttttttttttttttttttt

SEQ ID NO: 417 - DNA, 84 bp, synthetic construct
  source 1..84: mol_type = other DNA
tttttttaagcagtggtatcaacgcagagtacnnggatgaagnnatcaggctnntttttttttttttttttttttttttttttt

SEQ ID NO: 418 - DNA, 84 bp, synthetic construct
  source 1..84: mol_type = other DNA
tttttttaagcagtggtatcaacgcagagtacnnggatgaagnncaagttcgnntttttttttttttttttttttttttttttt

SEQ ID NO: 419 - DNA, 84 bp, synthetic construct
  source 1..84: mol_type = other DNA
tttttttaagcagtggtatcaacgcagagtacnnggatgaagnntagccaganntttttttttttttttttttttttttttttt

SEQ ID NO: 420 - DNA, 84 bp, synthetic construct
  source 1..84: mol_type = other DNA
tttttttaagcagtggtatcaacgcagagtacnnggatgaagnncaatcacgnntttttttttttttttttttttttttttttt

SEQ ID NO: 421 - DNA, 84 bp, synthetic construct
  source 1..84: mol_type = other DNA
tttttttaagcagtggtatcaacgcagagtacnnggatgaagnngcaacaagnntttttttttttttttttttttttttttttt

SEQ ID NO: 422 - DNA, 84 bp, synthetic construct
  source 1..84: mol_type = other DNA
tttttttaagcagtggtatcaacgcagagtacnnggatgaagnncacgacaanntttttttttttttttttttttttttttttt

SEQ ID NO: 423 - DNA, 84 bp, synthetic construct
  source 1..84: mol_type = other DNA
tttttttaagcagtggtatcaacgcagagtacnnggatgaagnntacggaganntttttttttttttttttttttttttttttt

SEQ ID NO: 424 - DNA, 84 bp, synthetic construct
  source 1..84: mol_type = other DNA
tttttttaagcagtggtatcaacgcagagtacnnggatgaagnncgacaaganntttttttttttttttttttttttttttttt

SEQ ID NO: 425 - DNA, 84 bp, synthetic construct
  source 1..84: mol_type = other DNA
tttttttaagcagtggtatcaacgcagagtacnnggatgaagnncgaagtganntttttttttttttttttttttttttttttt

SEQ ID NO: 426 - DNA, 84 bp, synthetic construct
  source 1..84: mol_type = other DNA
tttttttaagcagtggtatcaacgcagagtacnnggatgaagnnagctggtanntttttttttttttttttttttttttttttt

SEQ ID NO: 427 - DNA, 84 bp, synthetic construct
  source 1..84: mol_type = other DNA
tttttttaagcagtggtatcaacgcagagtacnnggatgaagnnaactaggcnntttttttttttttttttttttttttttttt

SEQ ID NO: 428 - DNA, 84 bp, synthetic construct
  source 1..84: mol_type = other DNA
tttttttaagcagtggtatcaacgcagagtacnnggatgaagnncagcaagtnntttttttttttttttttttttttttttttt

SEQ ID NO: 429 - DNA, 84 bp, synthetic construct
  source 1..84: mol_type = other DNA
tttttttaagcagtggtatcaacgcagagtacnnggatgaagnnacgaggtanntttttttttttttttttttttttttttttt

SEQ ID NO: 430 - DNA, 84 bp, synthetic construct
  source 1..84: mol_type = other DNA
tttttttaagcagtggtatcaacgcagagtacnnggatgaagnncatcttccnntttttttttttttttttttttttttttttt

SEQ ID NO: 431 - DNA, 84 bp, synthetic construct
  source 1..84: mol_type = other DNA
tttttttaagcagtggtatcaacgcagagtacnnggatgaagnncctgaatcnntttttttttttttttttttttttttttttt

SEQ ID NO: 432 - DNA, 84 bp, synthetic construct
  source 1..84: mol_type = other DNA
tttttttaagcagtggtatcaacgcagagtacnnggatgaagnntgcagactnntttttttttttttttttttttttttttttt

SEQ ID NO: 433 - DNA, 84 bp, synthetic construct
  source 1..84: mol_type = other DNA
tttttttaagcagtggtatcaacgcagagtacnnggatgaagnnagatgtggnntttttttttttttttttttttttttttttt

SEQ ID NO: 434 - DNA, 84 bp, synthetic construct
  source 1..84: mol_type = other DNA
tttttttaagcagtggtatcaacgcagagtacnnggatgaagnnagttcgacnntttttttttttttttttttttttttttttt

SEQ ID NO: 435 - DNA, 84 bp, synthetic construct
  source 1..84: mol_type = other DNA
tttttttaagcagtggtatcaacgcagagtacnnggatgaagnnacaacctcnntttttttttttttttttttttttttttttt

SEQ ID NO: 436 - DNA, 84 bp, synthetic construct
  source 1..84: mol_type = other DNA
tttttttaagcagtggtatcaacgcagagtacnnggatgaagnncatggtagnntttttttttttttttttttttttttttttt

SEQ ID NO: 437 - DNA, 84 bp, synthetic construct
  source 1..84: mol_type = other DNA
tttttttaagcagtggtatcaacgcagagtacnnggatgaagnncgtatctcnntttttttttttttttttttttttttttttt

SEQ ID NO: 438 - DNA, 84 bp, synthetic construct
  source 1..84: mol_type = other DNA
tttttttaagcagtggtatcaacgcagagtacnnggatgaagnncctagttcnntttttttttttttttttttttttttttttt

SEQ ID NO: 439 - DNA, 84 bp, synthetic construct
  source 1..84: mol_type = other DNA
tttttttaagcagtggtatcaacgcagagtacnnggatgaagnncaagagtcnntttttttttttttttttttttttttttttt

SEQ ID NO: 440 - DNA, 84 bp, synthetic construct
  source 1..84: mol_type = other DNA
tttttttaagcagtggtatcaacgcagagtacnntggaggatnnaatcggcanntttttttttttttttttttttttttttttt

SEQ ID NO: 441 - DNA, 84 bp, synthetic construct
  source 1..84: mol_type = other DNA
tttttttaagcagtggtatcaacgcagagtacnntggaggatnntacggcatnntttttttttttttttttttttttttttttt

SEQ ID NO: 442 - DNA, 84 bp, synthetic construct
  source 1..84: mol_type = other DNA
tttttttaagcagtggtatcaacgcagagtacnntggaggatnnttggatcgnntttttttttttttttttttttttttttttt

SEQ ID NO: 443 - DNA, 84 bp, synthetic construct
  source 1..84: mol_type = other DNA
tttttttaagcagtggtatcaacgcagagtacnntggaggatnntggaacganntttttttttttttttttttttttttttttt

SEQ ID NO: 444 - DNA, 84 bp, synthetic construct
  source 1..84: mol_type = other DNA
tttttttaagcagtggtatcaacgcagagtacnntggaggatnnggcaatcanntttttttttttttttttttttttttttttt

SEQ ID NO: 445 - DNA, 84 bp, synthetic construct
  source 1..84: mol_type = other DNA
tttttttaagcagtggtatcaacgcagagtacnntggaggatnngaatccganntttttttttttttttttttttttttttttt

SEQ ID NO: 446 - DNA, 84 bp, synthetic construct
  source 1..84: mol_type = other DNA
tttttttaagcagtggtatcaacgcagagtacnntggaggatnnttacggtgnntttttttttttttttttttttttttttttt

SEQ ID NO: 447 - DNA, 84 bp, synthetic construct
  source 1..84: mol_type = other DNA
tttttttaagcagtggtatcaacgcagagtacnntggaggatnncatatcggnntttttttttttttttttttttttttttttt

SEQ ID NO: 448 - DNA, 84 bp, synthetic construct
  source 1..84: mol_type = other DNA
tttttttaagcagtggtatcaacgcagagtacnntggaggatnncttcggtanntttttttttttttttttttttttttttttt

SEQ ID NO: 449 - DNA, 84 bp, synthetic construct
  source 1..84: mol_type = other DNA
tttttttaagcagtggtatcaacgcagagtacnntggaggatnntcctaacgnntttttttttttttttttttttttttttttt

SEQ ID NO: 450 - DNA, 84 bp, synthetic construct
  source 1..84: mol_type = other DNA
tttttttaagcagtggtatcaacgcagagtacnntggaggatnngtaagccanntttttttttttttttttttttttttttttt

SEQ ID NO: 451 - DNA, 84 bp, synthetic construct
  source 1..84: mol_type = other DNA
tttttttaagcagtggtatcaacgcagagtacnntggaggatnntaaggtggnntttttttttttttttttttttttttttttt

SEQ ID NO: 452 - DNA, 84 bp, synthetic construct
  source 1..84: mol_type = other DNA
tttttttaagcagtggtatcaacgcagagtacnntggaggatnnggtaagctnntttttttttttttttttttttttttttttt

SEQ ID NO: 453 - DNA, 84 bp, synthetic construct
  source 1..84: mol_type = other DNA
tttttttaagcagtggtatcaacgcagagtacnntggaggatnntgtgtcganntttttttttttttttttttttttttttttt

SEQ ID NO: 454 - DNA, 84 bp, synthetic construct
  source 1..84: mol_type = other DNA
tttttttaagcagtggtatcaacgcagagtacnntggaggatnngagcatganntttttttttttttttttttttttttttttt

SEQ ID NO: 455 - DNA, 84 bp, synthetic construct
  source 1..84: mol_type = other DNA
tttttttaagcagtggtatcaacgcagagtacnntggaggatnntcgaagtcnntttttttttttttttttttttttttttttt

SEQ ID NO: 456 - DNA, 84 bp, synthetic construct
  source 1..84: mol_type = other DNA
tttttttaagcagtggtatcaacgcagagtacnntggaggatnnggtgaacanntttttttttttttttttttttttttttttt

SEQ ID NO: 457 - DNA, 84 bp, synthetic construct
  source 1..84: mol_type = other DNA
tttttttaagcagtggtatcaacgcagagtacnntggaggatnnacatgcacnntttttttttttttttttttttttttttttt

SEQ ID NO: 458 - DNA, 84 bp, synthetic construct
  source 1..84: mol_type = other DNA
tttttttaagcagtggtatcaacgcagagtacnntggaggatnnccaacagtnntttttttttttttttttttttttttttttt

SEQ ID NO: 459 - DNA, 84 bp, synthetic construct
  source 1..84: mol_type = other DNA
tttttttaagcagtggtatcaacgcagagtacnntggaggatnnagaacagcnntttttttttttttttttttttttttttttt

SEQ ID NO: 460 - DNA, 84 bp, synthetic construct
  source 1..84: mol_type = other DNA
tttttttaagcagtggtatcaacgcagagtacnntggaggatnngaacacgtnntttttttttttttttttttttttttttttt

SEQ ID NO: 461 - DNA, 84 bp, synthetic construct
  source 1..84: mol_type = other DNA
tttttttaagcagtggtatcaacgcagagtacnntggaggatnnggtcttcanntttttttttttttttttttttttttttttt

SEQ ID NO: 462 - DNA, 84 bp, synthetic construct
  source 1..84: mol_type = other DNA
tttttttaagcagtggtatcaacgcagagtacnntggaggatnnaggttcagnntttttttttttttttttttttttttttttt

SEQ ID NO: 463 - DNA, 84 bp, synthetic construct
  source 1..84: mol_type = other DNA
tttttttaagcagtggtatcaacgcagagtacnntggaggatnnctagagcanntttttttttttttttttttttttttttttt

SEQ ID NO: 464 - DNA, 84 bp, synthetic construct
  source 1..84: mol_type = other DNA
tttttttaagcagtggtatcaacgcagagtacnntggaggatnncttctagcnntttttttttttttttttttttttttttttt

SEQ ID NO: 465 - DNA, 84 bp, synthetic construct
  source 1..84: mol_type = other DNA
tttttttaagcagtggtatcaacgcagagtacnntggaggatnngagtaacgnntttttttttttttttttttttttttttttt

SEQ ID NO: 466 - DNA, 84 bp, synthetic construct
  source 1..84: mol_type = other DNA
tttttttaagcagtggtatcaacgcagagtacnntggaggatnnctaagaggnntttttttttttttttttttttttttttttt

SEQ ID NO: 467 - DNA, 84 bp, synthetic construct
  source 1..84: mol_type = other DNA
tttttttaagcagtggtatcaacgcagagtacnntggaggatnnacgtgtagnntttttttttttttttttttttttttttttt

SEQ ID NO: 468 - DNA, 84 bp, synthetic construct
  source 1..84: mol_type = other DNA
tttttttaagcagtggtatcaacgcagagtacnntggaggatnnactacaggnntttttttttttttttttttttttttttttt

SEQ ID NO: 469 - DNA, 84 bp, synthetic construct
  source 1..84: mol_type = other DNA
tttttttaagcagtggtatcaacgcagagtacnntggaggatnntacaggtcnntttttttttttttttttttttttttttttt

SEQ ID NO: 470 - DNA, 84 bp, synthetic construct
  source 1..84: mol_type = other DNA
tttttttaagcagtggtatcaacgcagagtacnntggaggatnnctcacatgnntttttttttttttttttttttttttttttt

SEQ ID NO: 471 - DNA, 84 bp, synthetic construct
  source 1..84: mol_type = other DNA
tttttttaagcagtggtatcaacgcagagtacnntggaggatnnactaggagnntttttttttttttttttttttttttttttt

SEQ ID NO: 472 - DNA, 84 bp, synthetic construct
  source 1..84: mol_type = other DNA
tttttttaagcagtggtatcaacgcagagtacnntggaggatnnccatagganntttttttttttttttttttttttttttttt

SEQ ID NO: 473 - DNA, 84 bp, synthetic construct
  source 1..84: mol_type = other DNA
tttttttaagcagtggtatcaacgcagagtacnntggaggatnnggagaatcnntttttttttttttttttttttttttttttt

SEQ ID NO: 474 - DNA, 84 bp, synthetic construct
  source 1..84: mol_type = other DNA
tttttttaagcagtggtatcaacgcagagtacnntggaggatnngccaagaanntttttttttttttttttttttttttttttt

SEQ ID NO: 475 - DNA, 84 bp, synthetic construct
  source 1..84: mol_type = other DNA
tttttttaagcagtggtatcaacgcagagtacnntggaggatnnaaggcaagnntttttttttttttttttttttttttttttt

SEQ ID NO: 476 - DNA, 84 bp, synthetic construct
  source 1..84: mol_type = other DNA
tttttttaagcagtggtatcaacgcagagtacnntggaggatnnaatgtcgcnntttttttttttttttttttttttttttttt

SEQ ID NO: 477 - DNA, 84 bp, synthetic construct
  source 1..84: mol_type = other DNA
tttttttaagcagtggtatcaacgcagagtacnntggaggatnnatggaaccnntttttttttttttttttttttttttttttt

SEQ ID NO: 478 - DNA, 84 bp, synthetic construct
  source 1..84: mol_type = other DNA
tttttttaagcagtggtatcaacgcagagtacnntggaggatnnagaggcatnntttttttttttttttttttttttttttttt

SEQ ID NO: 479 - DNA, 84 bp, synthetic construct
  source 1..84: mol_type = other DNA
tttttttaagcagtggtatcaacgcagagtacnntggaggatnntgcatagcnntttttttttttttttttttttttttttttt

SEQ ID NO: 480 - DNA, 84 bp, synthetic construct
  source 1..84: mol_type = other DNA
tttttttaagcagtggtatcaacgcagagtacnntggaggatnnctaacgganntttttttttttttttttttttttttttttt

SEQ ID NO: 481 - DNA, 84 bp, synthetic construct
  source 1..84: mol_type = other DNA
tttttttaagcagtggtatcaacgcagagtacnntggaggatnntatcgaggnntttttttttttttttttttttttttttttt

SEQ ID NO: 482 - DNA, 84 bp, synthetic construct
  source 1..84: mol_type = other DNA
tttttttaagcagtggtatcaacgcagagtacnntggaggatnncatagcctnntttttttttttttttttttttttttttttt

SEQ ID NO: 483 - DNA, 84 bp, synthetic construct
  source 1..84: mol_type = other DNA
tttttttaagcagtggtatcaacgcagagtacnntggaggatnnatcgagacnntttttttttttttttttttttttttttttt

SEQ ID NO: 484 - DNA, 84 bp, synthetic construct
  source 1..84: mol_type = other DNA
tttttttaagcagtggtatcaacgcagagtacnntggaggatnnggaagagtnntttttttttttttttttttttttttttttt

SEQ ID NO: 485 - DNA, 84 bp, synthetic construct
  source 1..84: mol_type = other DNA
tttttttaagcagtggtatcaacgcagagtacnntggaggatnnccaagtagnntttttttttttttttttttttttttttttt

SEQ ID NO: 486 - DNA, 84 bp, synthetic construct
  source 1..84: mol_type = other DNA
tttttttaagcagtggtatcaacgcagagtacnntggaggatnnctgaacagnntttttttttttttttttttttttttttttt

SEQ ID NO: 487 - DNA, 84 bp, synthetic construct
  source 1..84: mol_type = other DNA
tttttttaagcagtggtatcaacgcagagtacnntggaggatnngtaggttcnntttttttttttttttttttttttttttttt

SEQ ID NO: 488 - DNA, 84 bp, synthetic construct
  source 1..84: mol_type = other DNA
tttttttaagcagtggtatcaacgcagagtacnntggaggatnngtatggacnntttttttttttttttttttttttttttttt

SEQ ID NO: 489 - DNA, 84 bp, synthetic construct
  source 1..84: mol_type = other DNA
tttttttaagcagtggtatcaacgcagagtacnntggaggatnntcgcaacanntttttttttttttttttttttttttttttt

SEQ ID NO: 490 - DNA, 84 bp, synthetic construct
  source 1..84: mol_type = other DNA
tttttttaagcagtggtatcaacgcagagtacnntggaggatnnccgctaatnntttttttttttttttttttttttttttttt

SEQ ID NO: 491 - DNA, 84 bp, synthetic construct
  source 1..84: mol_type = other DNA
tttttttaagcagtggtatcaacgcagagtacnntggaggatnngattcgcanntttttttttttttttttttttttttttttt

SEQ ID NO: 492 - DNA, 84 bp, synthetic construct
  source 1..84: mol_type = other DNA
tttttttaagcagtggtatcaacgcagagtacnntggaggatnncgatggaanntttttttttttttttttttttttttttttt

SEQ ID NO: 493 - DNA, 84 bp, synthetic construct
  source 1..84: mol_type = other DNA
tttttttaagcagtggtatcaacgcagagtacnntggaggatnnagcaagganntttttttttttttttttttttttttttttt

SEQ ID NO: 494 - DNA, 84 bp, synthetic construct
  source 1..84: mol_type = other DNA
tttttttaagcagtggtatcaacgcagagtacnntggaggatnncgtagcaanntttttttttttttttttttttttttttttt

SEQ ID NO: 495 - DNA, 84 bp, synthetic construct
  source 1..84: mol_type = other DNA
tttttttaagcagtggtatcaacgcagagtacnntggaggatnntggcagtanntttttttttttttttttttttttttttttt

SEQ ID NO: 496 - DNA, 84 bp, synthetic construct
  source 1..84: mol_type = other DNA
tttttttaagcagtggtatcaacgcagagtacnntggaggatnncggtagttnntttttttttttttttttttttttttttttt

SEQ ID NO: 497 - DNA, 84 bp, synthetic construct
  source 1..84: mol_type = other DNA
tttttttaagcagtggtatcaacgcagagtacnntggaggatnntgacttcgnntttttttttttttttttttttttttttttt

SEQ ID NO: 498 - DNA, 84 bp, synthetic construct
  source 1..84: mol_type = other DNA
tttttttaagcagtggtatcaacgcagagtacnntggaggatnngagtgcaanntttttttttttttttttttttttttttttt

SEQ ID NO: 499 - DNA, 84 bp, synthetic construct
  source 1..84: mol_type = other DNA
tttttttaagcagtggtatcaacgcagagtacnntggaggatnnacggtaacnntttttttttttttttttttttttttttttt

SEQ ID NO: 500 - DNA, 84 bp, synthetic construct
  source 1..84: mol_type = other DNA
tttttttaagcagtggtatcaacgcagagtacnntggaggatnnaagtggtgnntttttttttttttttttttttttttttttt

SEQ ID NO: 501 - DNA, 84 bp, synthetic construct
  source 1..84: mol_type = other DNA
tttttttaagcagtggtatcaacgcagagtacnntggaggatnnggagacaanntttttttttttttttttttttttttttttt

SEQ ID NO: 502 - DNA, 84 bp, synthetic construct
  source 1..84: mol_type = other DNA
tttttttaagcagtggtatcaacgcagagtacnntggaggatnntcaaggacnntttttttttttttttttttttttttttttt

SEQ ID NO: 503 - DNA, 84 bp, synthetic construct
  source 1..84: mol_type = other DNA
tttttttaagcagtggtatcaacgcagagtacnntggaggatnnaagagagcnntttttttttttttttttttttttttttttt

SEQ ID NO: 504 - DNA, 84 bp, synthetic construct
  source 1..84: mol_type = other DNA
tttttttaagcagtggtatcaacgcagagtacnntggaggatnncgagagatnntttttttttttttttttttttttttttttt

SEQ ID NO: 505 - DNA, 84 bp, synthetic construct
  source 1..84: mol_type = other DNA
tttttttaagcagtggtatcaacgcagagtacnntggaggatnnacagatggnntttttttttttttttttttttttttttttt

SEQ ID NO: 506 - DNA, 84 bp, synthetic construct
  source 1..84: mol_type = other DNA
tttttttaagcagtggtatcaacgcagagtacnntggaggatnnaggagtcanntttttttttttttttttttttttttttttt

SEQ ID NO: 507 - DNA, 84 bp, synthetic construct
  source 1..84: mol_type = other DNA
tttttttaagcagtggtatcaacgcagagtacnntggaggatnncgtgttacnntttttttttttttttttttttttttttttt

SEQ ID NO: 508 - DNA, 84 bp, synthetic construct
  source 1..84: mol_type = other DNA
tttttttaagcagtggtatcaacgcagagtacnntggaggatnntagtgtgcnntttttttttttttttttttttttttttttt

SEQ ID NO: 509 - DNA, 84 bp, synthetic construct
  source 1..84: mol_type = other DNA
tttttttaagcagtggtatcaacgcagagtacnntggaggatnnctcatgacnntttttttttttttttttttttttttttttt

SEQ ID NO: 510 - DNA, 84 bp, synthetic construct
  source 1..84: mol_type = other DNA
tttttttaagcagtggtatcaacgcagagtacnntggaggatnngtatccagnntttttttttttttttttttttttttttttt

SEQ ID NO: 511 - DNA, 84 bp, synthetic construct
  source 1..84: mol_type = other DNA
tttttttaagcagtggtatcaacgcagagtacnntggaggatnnacgcctatnntttttttttttttttttttttttttttttt

SEQ ID NO: 512 - DNA, 84 bp, synthetic construct
  source 1..84: mol_type = other DNA
tttttttaagcagtggtatcaacgcagagtacnntggaggatnnaacgacctnntttttttttttttttttttttttttttttt

SEQ ID NO: 513 - DNA, 84 bp, synthetic construct
  source 1..84: mol_type = other DNA
tttttttaagcagtggtatcaacgcagagtacnntggaggatnnatcaggctnntttttttttttttttttttttttttttttt

SEQ ID NO: 514 - DNA, 84 bp, synthetic construct
  source 1..84: mol_type = other DNA
tttttttaagcagtggtatcaacgcagagtacnntggaggatnncaagttcgnntttttttttttttttttttttttttttttt

SEQ ID NO: 515 - DNA, 84 bp, synthetic construct
  source 1..84: mol_type = other DNA
tttttttaagcagtggtatcaacgcagagtacnntggaggatnntagccaganntttttttttttttttttttttttttttttt

SEQ ID NO: 516 - DNA, 84 bp, synthetic construct
  source 1..84: mol_type = other DNA
tttttttaagcagtggtatcaacgcagagtacnntggaggatnncaatcacgnntttttttttttttttttttttttttttttt

SEQ ID NO: 517 - DNA, 84 bp, synthetic construct
  source 1..84: mol_type = other DNA
tttttttaagcagtggtatcaacgcagagtacnntggaggatnngcaacaagnntttttttttttttttttttttttttttttt

SEQ ID NO: 518 - DNA, 84 bp, synthetic construct
  source 1..84: mol_type = other DNA
tttttttaagcagtggtatcaacgcagagtacnntggaggatnncacgacaanntttttttttttttttttttttttttttttt

SEQ ID NO: 519 - DNA, 84 bp, synthetic construct
  source 1..84: mol_type = other DNA
tttttttaagcagtggtatcaacgcagagtacnntggaggatnntacggaganntttttttttttttttttttttttttttttt

SEQ ID NO: 520 - DNA, 84 bp, synthetic construct
  source 1..84: mol_type = other DNA
tttttttaagcagtggtatcaacgcagagtacnntggaggatnncgacaaganntttttttttttttttttttttttttttttt

SEQ ID NO: 521 - DNA, 84 bp, synthetic construct
  source 1..84: mol_type = other DNA
tttttttaagcagtggtatcaacgcagagtacnntggaggatnncgaagtganntttttttttttttttttttttttttttttt

SEQ ID NO: 522 - DNA, 84 bp, synthetic construct
  source 1..84: mol_type = other DNA
tttttttaagcagtggtatcaacgcagagtacnntggaggatnnagctggtanntttttttttttttttttttttttttttttt

SEQ ID NO: 523 - DNA, 84 bp, synthetic construct
  source 1..84: mol_type = other DNA
tttttttaagcagtggtatcaacgcagagtacnntggaggatnnaactaggcnntttttttttttttttttttttttttttttt

SEQ ID NO: 524 - DNA, 84 bp, synthetic construct
  source 1..84: mol_type = other DNA
tttttttaagcagtggtatcaacgcagagtacnntggaggatnncagcaagtnntttttttttttttttttttttttttttttt

SEQ ID NO: 525 - DNA, 84 bp, synthetic construct
  source 1..84: mol_type = other DNA
tttttttaagcagtggtatcaacgcagagtacnntggaggatnnacgaggtanntttttttttttttttttttttttttttttt

SEQ ID NO: 526 - DNA, 84 bp, synthetic construct
  source 1..84: mol_type = other DNA
tttttttaagcagtggtatcaacgcagagtacnntggaggatnncatcttccnntttttttttttttttttttttttttttttt

SEQ ID NO: 527 - DNA, 84 bp, synthetic construct
  source 1..84: mol_type = other DNA
tttttttaagcagtggtatcaacgcagagtacnntggaggatnncctgaatcnntttttttttttttttttttttttttttttt

SEQ ID NO: 528 - DNA, 84 bp, synthetic construct
  source 1..84: mol_type = other DNA
tttttttaagcagtggtatcaacgcagagtacnntggaggatnntgcagactnntttttttttttttttttttttttttttttt

SEQ ID NO: 529 - DNA, 84 bp, synthetic construct
  source 1..84: mol_type = other DNA
tttttttaagcagtggtatcaacgcagagtacnntggaggatnnagatgtggnntttttttttttttttttttttttttttttt

SEQ ID NO: 530 - DNA, 84 bp, synthetic construct
  source 1..84: mol_type = other DNA
tttttttaagcagtggtatcaacgcagagtacnntggaggatnnagttcgacnntttttttttttttttttttttttttttttt

SEQ ID NO: 531 - DNA, 84 bp, synthetic construct
  source 1..84: mol_type = other DNA
tttttttaagcagtggtatcaacgcagagtacnntggaggatnnacaacctcnntttttttttttttttttttttttttttttt

SEQ ID NO: 532 - DNA, 84 bp, synthetic construct
  source 1..84: mol_type = other DNA
tttttttaagcagtggtatcaacgcagagtacnntggaggatnncatggtagnntttttttttttttttttttttttttttttt

SEQ ID NO: 533 - DNA, 84 bp, synthetic construct
  source 1..84: mol_type = other DNA
tttttttaagcagtggtatcaacgcagagtacnntggaggatnncgtatctcnntttttttttttttttttttttttttttttt

SEQ ID NO: 534 - DNA, 84 bp, synthetic construct
  source 1..84: mol_type = other DNA
tttttttaagcagtggtatcaacgcagagtacnntggaggatnncctagttcnntttttttttttttttttttttttttttttt

SEQ ID NO: 535 - DNA, 84 bp, synthetic construct
  source 1..84: mol_type = other DNA
tttttttaagcagtggtatcaacgcagagtacnntggaggatnncaagagtcnntttttttttttttttttttttttttttttt

SEQ ID NO: 536 - DNA, 84 bp, synthetic construct
  source 1..84: mol_type = other DNA
tttttttaagcagtggtatcaacgcagagtacnnaggtaaggnnaatcggcanntttttttttttttttttttttttttttttt

SEQ ID NO: 537 - DNA, 84 bp, synthetic construct
  source 1..84: mol_type = other DNA
tttttttaagcagtggtatcaacgcagagtacnnaggtaaggnntacggcatnntttttttttttttttttttttttttttttt

SEQ ID NO: 538 - DNA, 84 bp, synthetic construct
  source 1..84: mol_type = other DNA
tttttttaagcagtggtatcaacgcagagtacnnaggtaaggnnttggatcgnntttttttttttttttttttttttttttttt

SEQ ID NO: 539 - DNA, 84 bp, synthetic construct
  source 1..84: mol_type = other DNA
tttttttaagcagtggtatcaacgcagagtacnnaggtaaggnntggaacganntttttttttttttttttttttttttttttt

SEQ ID NO: 540 - DNA, 84 bp, synthetic construct
  source 1..84: mol_type = other DNA
tttttttaagcagtggtatcaacgcagagtacnnaggtaaggnnggcaatcanntttttttttttttttttttttttttttttt

SEQ ID NO: 541 - DNA, 84 bp, synthetic construct
  source 1..84: mol_type = other DNA
tttttttaagcagtggtatcaacgcagagtacnnaggtaaggnngaatccganntttttttttttttttttttttttttttttt

SEQ ID NO: 542 - DNA, 84 bp, synthetic construct
  source 1..84: mol_type = other DNA
tttttttaagcagtggtatcaacgcagagtacnnaggtaaggnnttacggtgnntttttttttttttttttttttttttttttt

SEQ ID NO: 543 - DNA, 84 bp, synthetic construct
  source 1..84: mol_type = other DNA
tttttttaagcagtggtatcaacgcagagtacnnaggtaaggnncatatcggnntttttttttttttttttttttttttttttt

SEQ ID NO: 544 - DNA, 84 bp, synthetic construct
  source 1..84: mol_type = other DNA
tttttttaagcagtggtatcaacgcagagtacnnaggtaaggnncttcggtanntttttttttttttttttttttttttttttt

SEQ ID NO: 545 - DNA, 84 bp, synthetic construct
  source 1..84: mol_type = other DNA
tttttttaagcagtggtatcaacgcagagtacnnaggtaaggnntcctaacgnntttttttttttttttttttttttttttttt

SEQ ID NO: 546 - DNA, 84 bp, synthetic construct
  source 1..84: mol_type = other DNA
tttttttaagcagtggtatcaacgcagagtacnnaggtaaggnngtaagccanntttttttttttttttttttttttttttttt

SEQ ID NO: 547 - DNA, 84 bp, synthetic construct
  source 1..84: mol_type = other DNA
tttttttaagcagtggtatcaacgcagagtacnnaggtaaggnntaaggtggnntttttttttttttttttttttttttttttt

SEQ ID NO: 548 - DNA, 84 bp, synthetic construct
  source 1..84: mol_type = other DNA
tttttttaagcagtggtatcaacgcagagtacnnaggtaaggnnggtaagctnntttttttttttttttttttttttttttttt

SEQ ID NO: 549 - DNA, 84 bp, synthetic construct
  source 1..84: mol_type = other DNA
tttttttaagcagtggtatcaacgcagagtacnnaggtaaggnntgtgtcganntttttttttttttttttttttttttttttt

SEQ ID NO: 550 - DNA, 84 bp, synthetic construct
  source 1..84: mol_type = other DNA
tttttttaagcagtggtatcaacgcagagtacnnaggtaaggnngagcatganntttttttttttttttttttttttttttttt

SEQ ID NO: 551 - DNA, 84 bp, synthetic construct
  source 1..84: mol_type = other DNA
tttttttaagcagtggtatcaacgcagagtacnnaggtaaggnntcgaagtcnntttttttttttttttttttttttttttttt

SEQ ID NO: 552 - DNA, 84 bp, synthetic construct
  source 1..84: mol_type = other DNA
tttttttaagcagtggtatcaacgcagagtacnnaggtaaggnnggtgaacanntttttttttttttttttttttttttttttt

SEQ ID NO: 553 - DNA, 84 bp, synthetic construct
  source 1..84: mol_type = other DNA
tttttttaagcagtggtatcaacgcagagtacnnaggtaaggnnacatgcacnntttttttttttttttttttttttttttttt

SEQ ID NO: 554 - DNA, 84 bp, synthetic construct
  source 1..84: mol_type = other DNA
tttttttaagcagtggtatcaacgcagagtacnnaggtaaggnnccaacagtnntttttttttttttttttttttttttttttt

SEQ ID NO: 555 - DNA, 84 bp, synthetic construct
  source 1..84: mol_type = other DNA
tttttttaagcagtggtatcaacgcagagtacnnaggtaaggnnagaacagcnntttttttttttttttttttttttttttttt

SEQ ID NO: 556 - DNA, 84 bp, synthetic construct
  source 1..84: mol_type = other DNA
tttttttaagcagtggtatcaacgcagagtacnnaggtaaggnngaacacgtnntttttttttttttttttttttttttttttt

SEQ ID NO: 557 - DNA, 84 bp, synthetic construct
  source 1..84: mol_type = other DNA
tttttttaagcagtggtatcaacgcagagtacnnaggtaaggnnggtcttcanntttttttttttttttttttttttttttttt

SEQ ID NO: 558 - DNA, 84 bp, synthetic construct
  source 1..84: mol_type = other DNA
tttttttaagcagtggtatcaacgcagagtacnnaggtaaggnnaggttcagnntttttttttttttttttttttttttttttt

SEQ ID NO: 559 - DNA, 84 bp, synthetic construct
  source 1..84: mol_type = other DNA
tttttttaagcagtggtatcaacgcagagtacnnaggtaaggnnctagagcanntttttttttttttttttttttttttttttt

SEQ ID NO: 560 - DNA, 84 bp, synthetic construct
  source 1..84: mol_type = other DNA
tttttttaagcagtggtatcaacgcagagtacnnaggtaaggnncttctagcnntttttttttttttttttttttttttttttt

SEQ ID NO: 561 - DNA, 84 bp, synthetic construct
  source 1..84: mol_type = other DNA
tttttttaagcagtggtatcaacgcagagtacnnaggtaaggnngagtaacgnntttttttttttttttttttttttttttttt

SEQ ID NO: 562 - DNA, 84 bp, synthetic construct
  source 1..84: mol_type = other DNA
tttttttaagcagtggtatcaacgcagagtacnnaggtaaggnnctaagaggnntttttttttttttttttttttttttttttt

SEQ ID NO: 563 - DNA, 84 bp, synthetic construct
  source 1..84: mol_type = other DNA
tttttttaagcagtggtatcaacgcagagtacnnaggtaaggnnacgtgtagnntttttttttttttttttttttttttttttt

SEQ ID NO: 564 - DNA, 84 bp, synthetic construct
  source 1..84: mol_type = other DNA
tttttttaagcagtggtatcaacgcagagtacnnaggtaaggnnactacaggnntttttttttttttttttttttttttttttt

SEQ ID NO: 565 - DNA, 84 bp, synthetic construct
  source 1..84: mol_type = other DNA
tttttttaagcagtggtatcaacgcagagtacnnaggtaaggnntacaggtcnntttttttttttttttttttttttttttttt

SEQ ID NO: 566 - DNA, 84 bp, synthetic construct
  source 1..84: mol_type = other DNA
tttttttaagcagtggtatcaacgcagagtacnnaggtaaggnnctcacatgnntttttttttttttttttttttttttttttt

SEQ ID NO: 567 - DNA, 84 bp, synthetic construct
  source 1..84: mol_type = other DNA
tttttttaagcagtggtatcaacgcagagtacnnaggtaaggnnactaggagnntttttttttttttttttttttttttttttt

SEQ ID NO: 568 - DNA, 84 bp, synthetic construct
  source 1..84: mol_type = other DNA
tttttttaagcagtggtatcaacgcagagtacnnaggtaaggnnccatagganntttttttttttttttttttttttttttttt

SEQ ID NO: 569 - DNA, 84 bp, synthetic construct
  source 1..84: mol_type = other DNA
tttttttaagcagtggtatcaacgcagagtacnnaggtaaggnnggagaatcnntttttttttttttttttttttttttttttt

SEQ ID NO: 570 - DNA, 84 bp, synthetic construct
  source 1..84: mol_type = other DNA
tttttttaagcagtggtatcaacgcagagtacnnaggtaaggnngccaagaanntttttttttttttttttttttttttttttt

SEQ ID NO: 571 - DNA, 84 bp, synthetic construct
  source 1..84: mol_type = other DNA
tttttttaagcagtggtatcaacgcagagtacnnaggtaaggnnaaggcaagnntttttttttttttttttttttttttttttt

SEQ ID NO: 572 - DNA, 84 bp, synthetic construct
  source 1..84: mol_type = other DNA
tttttttaagcagtggtatcaacgcagagtacnnaggtaaggnnaatgtcgcnntttttttttttttttttttttttttttttt

SEQ ID NO: 573 - DNA, 84 bp, synthetic construct
  source 1..84: mol_type = other DNA
tttttttaagcagtggtatcaacgcagagtacnnaggtaaggnnatggaaccnntttttttttttttttttttttttttttttt

SEQ ID NO: 574 - DNA, 84 bp, synthetic construct
  source 1..84: mol_type = other DNA
tttttttaagcagtggtatcaacgcagagtacnnaggtaaggnnagaggcatnntttttttttttttttttttttttttttttt

SEQ ID NO: 575 - DNA, 84 bp, synthetic construct
  source 1..84: mol_type = other DNA
tttttttaagcagtggtatcaacgcagagtacnnaggtaaggnntgcatagcnntttttttttttttttttttttttttttttt

SEQ ID NO: 576 - DNA, 84 bp, synthetic construct
  source 1..84: mol_type = other DNA
tttttttaagcagtggtatcaacgcagagtacnnaggtaaggnnctaacgganntttttttttttttttttttttttttttttt

SEQ ID NO: 577 - DNA, 84 bp, synthetic construct
  source 1..84: mol_type = other DNA
tttttttaagcagtggtatcaacgcagagtacnnaggtaaggnntatcgaggnntttttttttttttttttttttttttttttt

SEQ ID NO: 578 - DNA, 84 bp, synthetic construct
  source 1..84: mol_type = other DNA
tttttttaagcagtggtatcaacgcagagtacnnaggtaaggnncatagcctnntttttttttttttttttttttttttttttt

SEQ ID NO: 579 - DNA, 84 bp, synthetic construct
  source 1..84: mol_type = other DNA
tttttttaagcagtggtatcaacgcagagtacnnaggtaaggnnatcgagacnntttttttttttttttttttttttttttttt

SEQ ID NO: 580 - DNA, 84 bp, synthetic construct
  source 1..84: mol_type = other DNA
tttttttaagcagtggtatcaacgcagagtacnnaggtaaggnnggaagagtnntttttttttttttttttttttttttttttt

SEQ ID NO: 581 - DNA, 84 bp, synthetic construct
  source 1..84: mol_type = other DNA
tttttttaagcagtggtatcaacgcagagtacnnaggtaaggnnccaagtagnntttttttttttttttttttttttttttttt

SEQ ID NO: 582 - DNA, 84 bp, synthetic construct
  source 1..84: mol_type = other DNA
tttttttaagcagtggtatcaacgcagagtacnnaggtaaggnnctgaacagnntttttttttttttttttttttttttttttt

SEQ ID NO: 583 - DNA, 84 bp, synthetic construct
  source 1..84: mol_type = other DNA
tttttttaagcagtggtatcaacgcagagtacnnaggtaaggnngtaggttcnntttttttttttttttttttttttttttttt

SEQ ID NO: 584 - DNA, 84 bp, synthetic construct
  source 1..84: mol_type = other DNA
tttttttaagcagtggtatcaacgcagagtacnnaggtaaggnngtatggacnntttttttttttttttttttttttttttttt

SEQ ID NO: 585 - DNA, 84 bp, synthetic construct
  source 1..84: mol_type = other DNA
tttttttaagcagtggtatcaacgcagagtacnnaggtaaggnntcgcaacanntttttttttttttttttttttttttttttt

SEQ ID NO: 586 - DNA, 84 bp, synthetic construct
  source 1..84: mol_type = other DNA
tttttttaagcagtggtatcaacgcagagtacnnaggtaaggnnccgctaatnntttttttttttttttttttttttttttttt

SEQ ID NO: 587 - DNA, 84 bp, synthetic construct
  source 1..84: mol_type = other DNA
tttttttaagcagtggtatcaacgcagagtacnnaggtaaggnngattcgcanntttttttttttttttttttttttttttttt

SEQ ID NO: 588 - DNA, 84 bp, synthetic construct
  source 1..84: mol_type = other DNA
tttttttaagcagtggtatcaacgcagagtacnnaggtaaggnncgatggaanntttttttttttttttttttttttttttttt

SEQ ID NO: 589 - DNA, 84 bp, synthetic construct
  source 1..84: mol_type = other DNA
tttttttaagcagtggtatcaacgcagagtacnnaggtaaggnnagcaagganntttttttttttttttttttttttttttttt

SEQ ID NO: 590 - DNA, 84 bp, synthetic construct
  source 1..84: mol_type = other DNA
tttttttaagcagtggtatcaacgcagagtacnnaggtaaggnncgtagcaanntttttttttttttttttttttttttttttt

SEQ ID NO: 591 - DNA, 84 bp, synthetic construct
  source 1..84: mol_type = other DNA
tttttttaagcagtggtatcaacgcagagtacnnaggtaaggnntggcagtanntttttttttttttttttttttttttttttt

SEQ ID NO: 592 - DNA, 84 bp, synthetic construct
  source 1..84: mol_type = other DNA
tttttttaagcagtggtatcaacgcagagtacnnaggtaaggnncggtagttnntttttttttttttttttttttttttttttt

SEQ ID NO: 593 - DNA, 84 bp, synthetic construct
  source 1..84: mol_type = other DNA
tttttttaagcagtggtatcaacgcagagtacnnaggtaaggnntgacttcgnntttttttttttttttttttttttttttttt

SEQ ID NO: 594 - DNA, 84 bp, synthetic construct
  source 1..84: mol_type = other DNA
tttttttaagcagtggtatcaacgcagagtacnnaggtaaggnngagtgcaanntttttttttttttttttttttttttttttt

SEQ ID NO: 595 - DNA, 84 bp, synthetic construct
  source 1..84: mol_type = other DNA
tttttttaagcagtggtatcaacgcagagtacnnaggtaaggnnacggtaacnntttttttttttttttttttttttttttttt

SEQ ID NO: 596 - DNA, 84 bp, synthetic construct
  source 1..84: mol_type = other DNA
tttttttaagcagtggtatcaacgcagagtacnnaggtaaggnnaagtggtgnntttttttttttttttttttttttttttttt

SEQ ID NO: 597 - DNA, 84 bp, synthetic construct
  source 1..84: mol_type = other DNA
tttttttaagcagtggtatcaacgcagagtacnnaggtaaggnnggagacaanntttttttttttttttttttttttttttttt

SEQ ID NO: 598 - DNA, 84 bp, synthetic construct
  source 1..84: mol_type = other DNA
tttttttaagcagtggtatcaacgcagagtacnnaggtaaggnntcaaggacnntttttttttttttttttttttttttttttt

SEQ ID NO: 599 - DNA, 84 bp, synthetic construct
  source 1..84: mol_type = other DNA
tttttttaagcagtggtatcaacgcagagtacnnaggtaaggnnaagagagcnntttttttttttttttttttttttttttttt

SEQ ID NO: 600 - DNA, 84 bp, synthetic construct
  source 1..84: mol_type = other DNA
tttttttaagcagtggtatcaacgcagagtacnnaggtaaggnncgagagatnntttttttttttttttttttttttttttttt

SEQ ID NO: 601 - DNA, 84 bp, synthetic construct
  source 1..84: mol_type = other DNA
tttttttaagcagtggtatcaacgcagagtacnnaggtaaggnnacagatggnntttttttttttttttttttttttttttttt

SEQ ID NO: 602 - DNA, 84 bp, synthetic construct
  source 1..84: mol_type = other DNA
tttttttaagcagtggtatcaacgcagagtacnnaggtaaggnnaggagtcanntttttttttttttttttttttttttttttt

SEQ ID NO: 603 - DNA, 84 bp, synthetic construct
  source 1..84: mol_type = other DNA
tttttttaagcagtggtatcaacgcagagtacnnaggtaaggnncgtgttacnntttttttttttttttttttttttttttttt

SEQ ID NO: 604 - DNA, 84 bp, synthetic construct
  source 1..84: mol_type = other DNA
tttttttaagcagtggtatcaacgcagagtacnnaggtaaggnntagtgtgcnntttttttttttttttttttttttttttttt

SEQ ID NO: 605 - DNA, 84 bp, synthetic construct
  source 1..84: mol_type = other DNA
tttttttaagcagtggtatcaacgcagagtacnnaggtaaggnnctcatgacnntttttttttttttttttttttttttttttt

SEQ ID NO: 606 - DNA, 84 bp, synthetic construct
  source 1..84: mol_type = other DNA
tttttttaagcagtggtatcaacgcagagtacnnaggtaaggnngtatccagnntttttttttttttttttttttttttttttt

SEQ ID NO: 607 - DNA, 84 bp, synthetic construct
  source 1..84: mol_type = other DNA
tttttttaagcagtggtatcaacgcagagtacnnaggtaaggnnacgcctatnntttttttttttttttttttttttttttttt

SEQ ID NO: 608 - DNA, 84 bp, synthetic construct
  source 1..84: mol_type = other DNA
tttttttaagcagtggtatcaacgcagagtacnnaggtaaggnnaacgacctnntttttttttttttttttttttttttttttt

SEQ ID NO: 609 - DNA, 84 bp, synthetic construct
  source 1..84: mol_type = other DNA
tttttttaagcagtggtatcaacgcagagtacnnaggtaaggnnatcaggctnntttttttttttttttttttttttttttttt

SEQ ID NO: 610 - DNA, 84 bp, synthetic construct
  source 1..84: mol_type = other DNA
tttttttaagcagtggtatcaacgcagagtacnnaggtaaggnncaagttcgnntttttttttttttttttttttttttttttt

SEQ ID NO: 611 - DNA, 84 bp, synthetic construct
  source 1..84: mol_type = other DNA
tttttttaagcagtggtatcaacgcagagtacnnaggtaaggnntagccaganntttttttttttttttttttttttttttttt

SEQ ID NO: 612 - DNA, 84 bp, synthetic construct
  source 1..84: mol_type = other DNA
tttttttaagcagtggtatcaacgcagagtacnnaggtaaggnncaatcacgnntttttttttttttttttttttttttttttt

SEQ ID NO: 613 - DNA, 84 bp, synthetic construct
  source 1..84: mol_type = other DNA
tttttttaagcagtggtatcaacgcagagtacnnaggtaaggnngcaacaagnntttttttttttttttttttttttttttttt

SEQ ID NO: 614 - DNA, 84 bp, synthetic construct
  source 1..84: mol_type = other DNA
tttttttaagcagtggtatcaacgcagagtacnnaggtaaggnncacgacaanntttttttttttttttttttttttttttttt

SEQ ID NO: 615 - DNA, 84 bp, synthetic construct
  source 1..84: mol_type = other DNA
tttttttaagcagtggtatcaacgcagagtacnnaggtaaggnntacggaganntttttttttttttttttttttttttttttt

SEQ ID NO: 616 - DNA, 84 bp, synthetic construct
  source 1..84: mol_type = other DNA
tttttttaagcagtggtatcaacgcagagtacnnaggtaaggnncgacaaganntttttttttttttttttttttttttttttt

SEQ ID NO: 617 - DNA, 84 bp, synthetic construct
  source 1..84: mol_type = other DNA
tttttttaagcagtggtatcaacgcagagtacnnaggtaaggnncgaagtganntttttttttttttttttttttttttttttt

SEQ ID NO: 618 - DNA, 84 bp, synthetic construct
  source 1..84: mol_type = other DNA
tttttttaagcagtggtatcaacgcagagtacnnaggtaaggnnagctggtanntttttttttttttttttttttttttttttt

SEQ ID NO: 619 - DNA, 84 bp, synthetic construct
  source 1..84: mol_type = other DNA
tttttttaagcagtggtatcaacgcagagtacnnaggtaaggnnaactaggcnntttttttttttttttttttttttttttttt

SEQ ID NO: 620 - DNA, 84 bp, synthetic construct
  source 1..84: mol_type = other DNA
tttttttaagcagtggtatcaacgcagagtacnnaggtaaggnncagcaagtnntttttttttttttttttttttttttttttt

SEQ ID NO: 621 - DNA, 84 bp, synthetic construct
  source 1..84: mol_type = other DNA
tttttttaagcagtggtatcaacgcagagtacnnaggtaaggnnacgaggtanntttttttttttttttttttttttttttttt

SEQ ID NO: 622 - DNA, 84 bp, synthetic construct
  source 1..84: mol_type = other DNA
tttttttaagcagtggtatcaacgcagagtacnnaggtaaggnncatcttccnntttttttttttttttttttttttttttttt

SEQ ID NO: 623 - DNA, 84 bp, synthetic construct
  source 1..84: mol_type = other DNA
tttttttaagcagtggtatcaacgcagagtacnnaggtaaggnncctgaatcnntttttttttttttttttttttttttttttt

SEQ ID NO: 624 - DNA, 84 bp, synthetic construct
  source 1..84: mol_type = other DNA
tttttttaagcagtggtatcaacgcagagtacnnaggtaaggnntgcagactnntttttttttttttttttttttttttttttt

SEQ ID NO: 625 - DNA, 84 bp, synthetic construct
  source 1..84: mol_type = other DNA
tttttttaagcagtggtatcaacgcagagtacnnaggtaaggnnagatgtggnntttttttttttttttttttttttttttttt

SEQ ID NO: 626 - DNA, 84 bp, synthetic construct
  source 1..84: mol_type = other DNA
tttttttaagcagtggtatcaacgcagagtacnnaggtaaggnnagttcgacnntttttttttttttttttttttttttttttt

SEQ ID NO: 627 - DNA, 84 bp, synthetic construct
  source 1..84: mol_type = other DNA
tttttttaagcagtggtatcaacgcagagtacnnaggtaaggnnacaacctcnntttttttttttttttttttttttttttttt

SEQ ID NO: 628 - DNA, 84 bp, synthetic construct
  source 1..84: mol_type = other DNA
tttttttaagcagtggtatcaacgcagagtacnnaggtaaggnncatggtagnntttttttttttttttttttttttttttttt

SEQ ID NO: 629 - DNA, 84 bp, synthetic construct
  source 1..84: mol_type = other DNA
tttttttaagcagtggtatcaacgcagagtacnnaggtaaggnncgtatctcnntttttttttttttttttttttttttttttt

SEQ ID NO: 630 - DNA, 84 bp, synthetic construct
  source 1..84: mol_type = other DNA
tttttttaagcagtggtatcaacgcagagtacnnaggtaaggnncctagttcnntttttttttttttttttttttttttttttt

SEQ ID NO: 631 - DNA, 84 bp, synthetic construct
  source 1..84: mol_type = other DNA
tttttttaagcagtggtatcaacgcagagtacnnaggtaaggnncaagagtcnntttttttttttttttttttttttttttttt

SEQ ID NO: 632 - DNA, 84 bp, synthetic construct
  source 1..84: mol_type = other DNA
tttttttaagcagtggtatcaacgcagagtacnnggaacttgnnaatcggcanntttttttttttttttttttttttttttttt

SEQ ID NO: 633 - DNA, 84 bp, synthetic construct
  source 1..84: mol_type = other DNA
tttttttaagcagtggtatcaacgcagagtacnnggaacttgnntacggcatnntttttttttttttttttttttttttttttt

SEQ ID NO: 634 - DNA, 84 bp, synthetic construct
  source 1..84: mol_type = other DNA
tttttttaagcagtggtatcaacgcagagtacnnggaacttgnnttggatcgnntttttttttttttttttttttttttttttt

SEQ ID NO: 635 - DNA, 84 bp, synthetic construct
  source 1..84: mol_type = other DNA
tttttttaagcagtggtatcaacgcagagtacnnggaacttgnntggaacganntttttttttttttttttttttttttttttt

SEQ ID NO: 636 - DNA, 84 bp, synthetic construct
  source 1..84: mol_type = other DNA
tttttttaagcagtggtatcaacgcagagtacnnggaacttgnnggcaatcanntttttttttttttttttttttttttttttt

SEQ ID NO: 637 - DNA, 84 bp, synthetic construct
  source 1..84: mol_type = other DNA
tttttttaagcagtggtatcaacgcagagtacnnggaacttgnngaatccganntttttttttttttttttttttttttttttt

SEQ ID NO: 638 - DNA, 84 bp, synthetic construct
  source 1..84: mol_type = other DNA
tttttttaagcagtggtatcaacgcagagtacnnggaacttgnnttacggtgnntttttttttttttttttttttttttttttt

SEQ ID NO: 639 - DNA, 84 bp, synthetic construct
  source 1..84: mol_type = other DNA
tttttttaagcagtggtatcaacgcagagtacnnggaacttgnncatatcggnntttttttttttttttttttttttttttttt

SEQ ID NO: 640 - DNA, 84 bp, synthetic construct
  source 1..84: mol_type = other DNA
tttttttaagcagtggtatcaacgcagagtacnnggaacttgnncttcggtanntttttttttttttttttttttttttttttt

SEQ ID NO: 641 - DNA, 84 bp, synthetic construct
  source 1..84: mol_type = other DNA
tttttttaagcagtggtatcaacgcagagtacnnggaacttgnntcctaacgnntttttttttttttttttttttttttttttt

SEQ ID NO: 642 - DNA, 84 bp, synthetic construct
  source 1..84: mol_type = other DNA
tttttttaagcagtggtatcaacgcagagtacnnggaacttgnngtaagccanntttttttttttttttttttttttttttttt

SEQ ID NO: 643 - DNA, 84 bp, synthetic construct
  source 1..84: mol_type = other DNA
tttttttaagcagtggtatcaacgcagagtacnnggaacttgnntaaggtggnntttttttttttttttttttttttttttttt

SEQ ID NO: 644 - DNA, 84 bp, synthetic construct
  source 1..84: mol_type = other DNA
tttttttaagcagtggtatcaacgcagagtacnnggaacttgnnggtaagctnntttttttttttttttttttttttttttttt

SEQ ID NO: 645 - DNA, 84 bp, synthetic construct
  source 1..84: mol_type = other DNA
tttttttaagcagtggtatcaacgcagagtacnnggaacttgnntgtgtcganntttttttttttttttttttttttttttttt

SEQ ID NO: 646 - DNA, 84 bp, synthetic construct
  source 1..84: mol_type = other DNA
tttttttaagcagtggtatcaacgcagagtacnnggaacttgnngagcatganntttttttttttttttttttttttttttttt

SEQ ID NO: 647 - DNA, 84 bp, synthetic construct
  source 1..84: mol_type = other DNA
tttttttaagcagtggtatcaacgcagagtacnnggaacttgnntcgaagtcnntttttttttttttttttttttttttttttt

SEQ ID NO: 648 - DNA, 84 bp, synthetic construct
  source 1..84: mol_type = other DNA
tttttttaagcagtggtatcaacgcagagtacnnggaacttgnnggtgaacanntttttttttttttttttttttttttttttt

SEQ ID NO: 649 - DNA, 84 bp, synthetic construct
  source 1..84: mol_type = other DNA
tttttttaagcagtggtatcaacgcagagtacnnggaacttgnnacatgcacnntttttttttttttttttttttttttttttt

SEQ ID NO: 650 - DNA, 84 bp, synthetic construct
  source 1..84: mol_type = other DNA
tttttttaagcagtggtatcaacgcagagtacnnggaacttgnnccaacagtnntttttttttttttttttttttttttttttt

SEQ ID NO: 651 - DNA, 84 bp, synthetic construct
  source 1..84: mol_type = other DNA
tttttttaagcagtggtatcaacgcagagtacnnggaacttgnnagaacagcnntttttttttttttttttttttttttttttt

SEQ ID NO: 652 - DNA, 84 bp, synthetic construct
  source 1..84: mol_type = other DNA
tttttttaagcagtggtatcaacgcagagtacnnggaacttgnngaacacgtnntttttttttttttttttttttttttttttt

SEQ ID NO: 653 - DNA, 84 bp, synthetic construct
  source 1..84: mol_type = other DNA
tttttttaagcagtggtatcaacgcagagtacnnggaacttgnnggtcttcanntttttttttttttttttttttttttttttt

SEQ ID NO: 654 - DNA, 84 bp, synthetic construct
  source 1..84: mol_type = other DNA
tttttttaagcagtggtatcaacgcagagtacnnggaacttgnnaggttcagnntttttttttttttttttttttttttttttt

SEQ ID NO: 655 - DNA, 84 bp, synthetic construct
  source 1..84: mol_type = other DNA
tttttttaagcagtggtatcaacgcagagtacnnggaacttgnnctagagcanntttttttttttttttttttttttttttttt

SEQ ID NO: 656 - DNA, 84 bp, synthetic construct
  source 1..84: mol_type = other DNA
tttttttaagcagtggtatcaacgcagagtacnnggaacttgnncttctagcnntttttttttttttttttttttttttttttt

SEQ ID NO: 657 - DNA, 84 bp, synthetic construct
  source 1..84: mol_type = other DNA
tttttttaagcagtggtatcaacgcagagtacnnggaacttgnngagtaacgnntttttttttttttttttttttttttttttt

SEQ ID NO: 658 - DNA, 84 bp, synthetic construct
  source 1..84: mol_type = other DNA
tttttttaagcagtggtatcaacgcagagtacnnggaacttgnnctaagaggnntttttttttttttttttttttttttttttt

SEQ ID NO: 659 - DNA, 84 bp, synthetic construct
  source 1..84: mol_type = other DNA
tttttttaagcagtggtatcaacgcagagtacnnggaacttgnnacgtgtagnntttttttttttttttttttttttttttttt

SEQ ID NO: 660 - DNA, 84 bp, synthetic construct
  source 1..84: mol_type = other DNA
tttttttaagcagtggtatcaacgcagagtacnnggaacttgnnactacaggnntttttttttttttttttttttttttttttt

SEQ ID NO: 661 - DNA, 84 bp, synthetic construct
  source 1..84: mol_type = other DNA
tttttttaagcagtggtatcaacgcagagtacnnggaacttgnntacaggtcnntttttttttttttttttttttttttttttt

SEQ ID NO: 662 - DNA, 84 bp, synthetic construct
  source 1..84: mol_type = other DNA
tttttttaagcagtggtatcaacgcagagtacnnggaacttgnnctcacatgnntttttttttttttttttttttttttttttt

SEQ ID NO: 663 - DNA, 84 bp, synthetic construct
  source 1..84: mol_type = other DNA
tttttttaagcagtggtatcaacgcagagtacnnggaacttgnnactaggagnntttttttttttttttttttttttttttttt

SEQ ID NO: 664 - DNA, 84 bp, synthetic construct
  source 1..84: mol_type = other DNA
tttttttaagcagtggtatcaacgcagagtacnnggaacttgnnccatagganntttttttttttttttttttttttttttttt

SEQ ID NO: 665 - DNA, 84 bp, synthetic construct
  source 1..84: mol_type = other DNA
tttttttaagcagtggtatcaacgcagagtacnnggaacttgnnggagaatcnntttttttttttttttttttttttttttttt

SEQ ID NO: 666 - DNA, 84 bp, synthetic construct
  source 1..84: mol_type = other DNA
tttttttaagcagtggtatcaacgcagagtacnnggaacttgnngccaagaanntttttttttttttttttttttttttttttt

SEQ ID NO: 667 - DNA, 84 bp, synthetic construct
  source 1..84: mol_type = other DNA
tttttttaagcagtggtatcaacgcagagtacnnggaacttgnnaaggcaagnntttttttttttttttttttttttttttttt

SEQ ID NO: 668 - DNA, 84 bp, synthetic construct
  source 1..84: mol_type = other DNA
tttttttaagcagtggtatcaacgcagagtacnnggaacttgnnaatgtcgcnntttttttttttttttttttttttttttttt

SEQ ID NO: 669 - DNA, 84 bp, synthetic construct
  source 1..84: mol_type = other DNA
tttttttaagcagtggtatcaacgcagagtacnnggaacttgnnatggaaccnntttttttttttttttttttttttttttttt

SEQ ID NO: 670 - DNA, 84 bp, synthetic construct
  source 1..84: mol_type = other DNA
tttttttaagcagtggtatcaacgcagagtacnnggaacttgnnagaggcatnntttttttttttttttttttttttttttttt

SEQ ID NO: 671 - DNA, 84 bp, synthetic construct
  source 1..84: mol_type = other DNA
tttttttaagcagtggtatcaacgcagagtacnnggaacttgnntgcatagcnntttttttttttttttttttttttttttttt

SEQ ID NO: 672 - DNA, 84 bp, synthetic construct
  source 1..84: mol_type = other DNA
tttttttaagcagtggtatcaacgcagagtacnnggaacttgnnctaacgganntttttttttttttttttttttttttttttt

SEQ ID NO: 673 - DNA, 84 bp, synthetic construct
  source 1..84: mol_type = other DNA
tttttttaagcagtggtatcaacgcagagtacnnggaacttgnntatcgaggnntttttttttttttttttttttttttttttt

SEQ ID NO: 674 - DNA, 84 bp, synthetic construct
  source 1..84: mol_type = other DNA
tttttttaagcagtggtatcaacgcagagtacnnggaacttgnncatagcctnntttttttttttttttttttttttttttttt

SEQ ID NO: 675 - DNA, 84 bp, synthetic construct
  source 1..84: mol_type = other DNA
tttttttaagcagtggtatcaacgcagagtacnnggaacttgnnatcgagacnntttttttttttttttttttttttttttttt

SEQ ID NO: 676 - DNA, 84 bp, synthetic construct
  source 1..84: mol_type = other DNA
tttttttaagcagtggtatcaacgcagagtacnnggaacttgnnggaagagtnntttttttttttttttttttttttttttttt

SEQ ID NO: 677 - DNA, 84 bp, synthetic construct
  source 1..84: mol_type = other DNA
tttttttaagcagtggtatcaacgcagagtacnnggaacttgnnccaagtagnntttttttttttttttttttttttttttttt

SEQ ID NO: 678 - DNA, 84 bp, synthetic construct
  source 1..84: mol_type = other DNA
tttttttaagcagtggtatcaacgcagagtacnnggaacttgnnctgaacagnntttttttttttttttttttttttttttttt

SEQ ID NO: 679 - DNA, 84 bp, synthetic construct
  source 1..84: mol_type = other DNA
tttttttaagcagtggtatcaacgcagagtacnnggaacttgnngtaggttcnntttttttttttttttttttttttttttttt

SEQ ID NO: 680 - DNA, 84 bp, synthetic construct
  source 1..84: mol_type = other DNA
tttttttaagcagtggtatcaacgcagagtacnnggaacttgnngtatggacnntttttttttttttttttttttttttttttt

SEQ ID NO: 681 - DNA, 84 bp, synthetic construct
  source 1..84: mol_type = other DNA
tttttttaagcagtggtatcaacgcagagtacnnggaacttgnntcgcaacanntttttttttttttttttttttttttttttt

SEQ ID NO: 682 - DNA, 84 bp, synthetic construct
  source 1..84: mol_type = other DNA
tttttttaagcagtggtatcaacgcagagtacnnggaacttgnnccgctaatnntttttttttttttttttttttttttttttt

SEQ ID NO: 683 - DNA, 84 bp, synthetic construct
  source 1..84: mol_type = other DNA
tttttttaagcagtggtatcaacgcagagtacnnggaacttgnngattcgcanntttttttttttttttttttttttttttttt

SEQ ID NO: 684 - DNA, 84 bp, synthetic construct
  source 1..84: mol_type = other DNA
tttttttaagcagtggtatcaacgcagagtacnnggaacttgnncgatggaanntttttttttttttttttttttttttttttt

SEQ ID NO: 685 - DNA, 84 bp, synthetic construct
  source 1..84: mol_type = other DNA
tttttttaagcagtggtatcaacgcagagtacnnggaacttgnnagcaagganntttttttttttttttttttttttttttttt

SEQ ID NO: 686 - DNA, 84 bp, synthetic construct
  source 1..84: mol_type = other DNA
tttttttaagcagtggtatcaacgcagagtacnnggaacttgnncgtagcaanntttttttttttttttttttttttttttttt

SEQ ID NO: 687 - DNA, 84 bp, synthetic construct
  source 1..84: mol_type = other DNA
tttttttaagcagtggtatcaacgcagagtacnnggaacttgnntggcagtanntttttttttttttttttttttttttttttt

SEQ ID NO: 688 - DNA, 84 bp, synthetic construct
  source 1..84: mol_type = other DNA
tttttttaagcagtggtatcaacgcagagtacnnggaacttgnncggtagttnntttttttttttttttttttttttttttttt

SEQ ID NO: 689 - DNA, 84 bp, synthetic construct
  source 1..84: mol_type = other DNA
tttttttaagcagtggtatcaacgcagagtacnnggaacttgnntgacttcgnntttttttttttttttttttttttttttttt

SEQ ID NO: 690 - DNA, 84 bp, synthetic construct
  source 1..84: mol_type = other DNA
tttttttaagcagtggtatcaacgcagagtacnnggaacttgnngagtgcaanntttttttttttttttttttttttttttttt

SEQ ID NO: 691 - DNA, 84 bp, synthetic construct
  source 1..84: mol_type = other DNA
tttttttaagcagtggtatcaacgcagagtacnnggaacttgnnacggtaacnntttttttttttttttttttttttttttttt

SEQ ID NO: 692 - DNA, 84 bp, synthetic construct
  source 1..84: mol_type = other DNA
tttttttaagcagtggtatcaacgcagagtacnnggaacttgnnaagtggtgnntttttttttttttttttttttttttttttt

SEQ ID NO: 693 - DNA, 84 bp, synthetic construct
  source 1..84: mol_type = other DNA
tttttttaagcagtggtatcaacgcagagtacnnggaacttgnnggagacaanntttttttttttttttttttttttttttttt

SEQ ID NO: 694 - DNA, 84 bp, synthetic construct
  source 1..84: mol_type = other DNA
tttttttaagcagtggtatcaacgcagagtacnnggaacttgnntcaaggacnntttttttttttttttttttttttttttttt

SEQ ID NO: 695 - DNA, 84 bp, synthetic construct
  source 1..84: mol_type = other DNA
tttttttaagcagtggtatcaacgcagagtacnnggaacttgnnaagagagcnntttttttttttttttttttttttttttttt

SEQ ID NO: 696 - DNA, 84 bp, synthetic construct
  source 1..84: mol_type = other DNA
tttttttaagcagtggtatcaacgcagagtacnnggaacttgnncgagagatnntttttttttttttttttttttttttttttt

SEQ ID NO: 697 - DNA, 84 bp, synthetic construct
  source 1..84: mol_type = other DNA
tttttttaagcagtggtatcaacgcagagtacnnggaacttgnnacagatggnntttttttttttttttttttttttttttttt

SEQ ID NO: 698 - DNA, 84 bp, synthetic construct
  source 1..84: mol_type = other DNA
tttttttaagcagtggtatcaacgcagagtacnnggaacttgnnaggagtcanntttttttttttttttttttttttttttttt

SEQ ID NO: 699 - DNA, 84 bp, synthetic construct
  source 1..84: mol_type = other DNA
tttttttaagcagtggtatcaacgcagagtacnnggaacttgnncgtgttacnntttttttttttttttttttttttttttttt

SEQ ID NO: 700 - DNA, 84 bp, synthetic construct
  source 1..84: mol_type = other DNA
tttttttaagcagtggtatcaacgcagagtacnnggaacttgnntagtgtgcnntttttttttttttttttttttttttttttt

SEQ ID NO: 701 - DNA, 84 bp, synthetic construct
  source 1..84: mol_type = other DNA
tttttttaagcagtggtatcaacgcagagtacnnggaacttgnnctcatgacnntttttttttttttttttttttttttttttt

SEQ ID NO: 702 - DNA, 84 bp, synthetic construct
  source 1..84: mol_type = other DNA
tttttttaagcagtggtatcaacgcagagtacnnggaacttgnngtatccagnntttttttttttttttttttttttttttttt

SEQ ID NO: 703 - DNA, 84 bp, synthetic construct
  source 1..84: mol_type = other DNA
tttttttaagcagtggtatcaacgcagagtacnnggaacttgnnacgcctatnntttttttttttttttttttttttttttttt

SEQ ID NO: 704 - DNA, 84 bp, synthetic construct
  source 1..84: mol_type = other DNA
tttttttaagcagtggtatcaacgcagagtacnnggaacttgnnaacgacctnntttttttttttttttttttttttttttttt

SEQ ID NO: 705 - DNA, 84 bp, synthetic construct
  source 1..84: mol_type = other DNA
tttttttaagcagtggtatcaacgcagagtacnnggaacttgnnatcaggctnntttttttttttttttttttttttttttttt

SEQ ID NO: 706 - DNA, 84 bp, synthetic construct
  source 1..84: mol_type = other DNA
tttttttaagcagtggtatcaacgcagagtacnnggaacttgnncaagttcgnntttttttttttttttttttttttttttttt

SEQ ID NO: 707 - DNA, 84 bp, synthetic construct
  source 1..84: mol_type = other DNA
tttttttaagcagtggtatcaacgcagagtacnnggaacttgnntagccaganntttttttttttttttttttttttttttttt

SEQ ID NO: 708 - DNA, 84 bp, synthetic construct
  source 1..84: mol_type = other DNA
tttttttaagcagtggtatcaacgcagagtacnnggaacttgnncaatcacgnntttttttttttttttttttttttttttttt

SEQ ID NO: 709 - DNA, 84 bp, synthetic construct
  source 1..84: mol_type = other DNA
tttttttaagcagtggtatcaacgcagagtacnnggaacttgnngcaacaagnntttttttttttttttttttttttttttttt

SEQ ID NO: 710 - DNA, 84 bp, synthetic construct
  source 1..84: mol_type = other DNA
tttttttaagcagtggtatcaacgcagagtacnnggaacttgnncacgacaanntttttttttttttttttttttttttttttt

SEQ ID NO: 711 - DNA, 84 bp, synthetic construct
  source 1..84: mol_type = other DNA
tttttttaagcagtggtatcaacgcagagtacnnggaacttgnntacggaganntttttttttttttttttttttttttttttt

SEQ ID NO: 712 - DNA, 84 bp, synthetic construct
  source 1..84: mol_type = other DNA
tttttttaagcagtggtatcaacgcagagtacnnggaacttgnncgacaaganntttttttttttttttttttttttttttttt

SEQ ID NO: 713 - DNA, 84 bp, synthetic construct
  source 1..84: mol_type = other DNA
tttttttaagcagtggtatcaacgcagagtacnnggaacttgnncgaagtganntttttttttttttttttttttttttttttt

SEQ ID NO: 714 - DNA, 84 bp, synthetic construct
  source 1..84: mol_type = other DNA
tttttttaagcagtggtatcaacgcagagtacnnggaacttgnnagctggtanntttttttttttttttttttttttttttttt

SEQ ID NO: 715 - DNA, 84 bp, synthetic construct
  source 1..84: mol_type = other DNA
tttttttaagcagtggtatcaacgcagagtacnnggaacttgnnaactaggcnntttttttttttttttttttttttttttttt

SEQ ID NO: 716 - DNA, 84 bp, synthetic construct
  source 1..84: mol_type = other DNA
tttttttaagcagtggtatcaacgcagagtacnnggaacttgnncagcaagtnntttttttttttttttttttttttttttttt

SEQ ID NO: 717 - DNA, 84 bp, synthetic construct
  source 1..84: mol_type = other DNA
tttttttaagcagtggtatcaacgcagagtacnnggaacttgnnacgaggtanntttttttttttttttttttttttttttttt

SEQ ID NO: 718 - DNA, 84 bp, synthetic construct
  source 1..84: mol_type = other DNA
tttttttaagcagtggtatcaacgcagagtacnnggaacttgnncatcttccnntttttttttttttttttttttttttttttt

SEQ ID NO: 719 - DNA, 84 bp, synthetic construct
  source 1..84: mol_type = other DNA
tttttttaagcagtggtatcaacgcagagtacnnggaacttgnncctgaatcnntttttttttttttttttttttttttttttt

SEQ ID NO: 720 - DNA, 84 bp, synthetic construct
  source 1..84: mol_type = other DNA
tttttttaagcagtggtatcaacgcagagtacnnggaacttgnntgcagactnntttttttttttttttttttttttttttttt

SEQ ID NO: 721 - DNA, 84 bp, synthetic construct
  source 1..84: mol_type = other DNA
tttttttaagcagtggtatcaacgcagagtacnnggaacttgnnagatgtggnntttttttttttttttttttttttttttttt

SEQ ID NO: 722 - DNA, 84 bp, synthetic construct
  source 1..84: mol_type = other DNA
tttttttaagcagtggtatcaacgcagagtacnnggaacttgnnagttcgacnntttttttttttttttttttttttttttttt

SEQ ID NO: 723 - DNA, 84 bp, synthetic construct
  source 1..84: mol_type = other DNA
tttttttaagcagtggtatcaacgcagagtacnnggaacttgnnacaacctcnntttttttttttttttttttttttttttttt

SEQ ID NO: 724 - DNA, 84 bp, synthetic construct
  source 1..84: mol_type = other DNA
tttttttaagcagtggtatcaacgcagagtacnnggaacttgnncatggtagnntttttttttttttttttttttttttttttt

SEQ ID NO: 725 - DNA, 84 bp, synthetic construct
  source 1..84: mol_type = other DNA
tttttttaagcagtggtatcaacgcagagtacnnggaacttgnncgtatctcnntttttttttttttttttttttttttttttt

SEQ ID NO: 726 - DNA, 84 bp, synthetic construct
  source 1..84: mol_type = other DNA
tttttttaagcagtggtatcaacgcagagtacnnggaacttgnncctagttcnntttttttttttttttttttttttttttttt

SEQ ID NO: 727 - DNA, 84 bp, synthetic construct
  source 1..84: mol_type = other DNA
tttttttaagcagtggtatcaacgcagagtacnnggaacttgnncaagagtcnntttttttttttttttttttttttttttttt

SEQ ID NO: 728 - DNA, 84 bp, synthetic construct
  source 1..84: mol_type = other DNA
tttttttaagcagtggtatcaacgcagagtacnnggttagtgnnaatcggcanntttttttttttttttttttttttttttttt

SEQ ID NO: 729 - DNA, 84 bp, synthetic construct
  source 1..84: mol_type = other DNA
tttttttaagcagtggtatcaacgcagagtacnnggttagtgnntacggcatnntttttttttttttttttttttttttttttt

SEQ ID NO: 730 - DNA, 84 bp, synthetic construct
  source 1..84: mol_type = other DNA
tttttttaagcagtggtatcaacgcagagtacnnggttagtgnnttggatcgnntttttttttttttttttttttttttttttt

SEQ ID NO: 731 - DNA, 84 bp, synthetic construct
  source 1..84: mol_type = other DNA
tttttttaagcagtggtatcaacgcagagtacnnggttagtgnntggaacganntttttttttttttttttttttttttttttt

SEQ ID NO: 732 - DNA, 84 bp, synthetic construct
  source 1..84: mol_type = other DNA
tttttttaagcagtggtatcaacgcagagtacnnggttagtgnnggcaatcanntttttttttttttttttttttttttttttt

SEQ ID NO: 733 - DNA, 84 bp, synthetic construct
  source 1..84: mol_type = other DNA
tttttttaagcagtggtatcaacgcagagtacnnggttagtgnngaatccganntttttttttttttttttttttttttttttt

SEQ ID NO: 734 - DNA, 84 bp, synthetic construct
  source 1..84: mol_type = other DNA
tttttttaagcagtggtatcaacgcagagtacnnggttagtgnnttacggtgnntttttttttttttttttttttttttttttt

SEQ ID NO: 735 - DNA, 84 bp, synthetic construct
  source 1..84: mol_type = other DNA
tttttttaagcagtggtatcaacgcagagtacnnggttagtgnncatatcggnntttttttttttttttttttttttttttttt

SEQ ID NO: 736 - DNA, 84 bp, synthetic construct
  source 1..84: mol_type = other DNA
tttttttaagcagtggtatcaacgcagagtacnnggttagtgnncttcggtanntttttttttttttttttttttttttttttt

SEQ ID NO: 737 - DNA, 84 bp, synthetic construct
  source 1..84: mol_type = other DNA
tttttttaagcagtggtatcaacgcagagtacnnggttagtgnntcctaacgnntttttttttttttttttttttttttttttt

SEQ ID NO: 738 - DNA, 84 bp, synthetic construct
  source 1..84: mol_type = other DNA
tttttttaagcagtggtatcaacgcagagtacnnggttagtgnngtaagccanntttttttttttttttttttttttttttttt

SEQ ID NO: 739 - DNA, 84 bp, synthetic construct
  source 1..84: mol_type = other DNA
tttttttaagcagtggtatcaacgcagagtacnnggttagtgnntaaggtggnntttttttttttttttttttttttttttttt

SEQ ID NO: 740 - DNA, 84 bp, synthetic construct
  source 1..84: mol_type = other DNA
tttttttaagcagtggtatcaacgcagagtacnnggttagtgnnggtaagctnntttttttttttttttttttttttttttttt

SEQ ID NO: 741 - DNA, 84 bp, synthetic construct
  source 1..84: mol_type = other DNA
tttttttaagcagtggtatcaacgcagagtacnnggttagtgnntgtgtcganntttttttttttttttttttttttttttttt

SEQ ID NO: 742 - DNA, 84 bp, synthetic construct
  source 1..84: mol_type = other DNA
tttttttaagcagtggtatcaacgcagagtacnnggttagtgnngagcatganntttttttttttttttttttttttttttttt

SEQ ID NO: 743 - DNA, 84 bp, synthetic construct
  source 1..84: mol_type = other DNA
tttttttaagcagtggtatcaacgcagagtacnnggttagtgnntcgaagtcnntttttttttttttttttttttttttttttt

SEQ ID NO: 744 - DNA, 84 bp, synthetic construct
  source 1..84: mol_type = other DNA
tttttttaagcagtggtatcaacgcagagtacnnggttagtgnnggtgaacanntttttttttttttttttttttttttttttt

SEQ ID NO: 745 - DNA, 84 bp, synthetic construct
  source 1..84: mol_type = other DNA
tttttttaagcagtggtatcaacgcagagtacnnggttagtgnnacatgcacnntttttttttttttttttttttttttttttt

SEQ ID NO: 746 - DNA, 84 bp, synthetic construct
  source 1..84: mol_type = other DNA
tttttttaagcagtggtatcaacgcagagtacnnggttagtgnnccaacagtnntttttttttttttttttttttttttttttt

SEQ ID NO: 747 - DNA, 84 bp, synthetic construct
  source 1..84: mol_type = other DNA
tttttttaagcagtggtatcaacgcagagtacnnggttagtgnnagaacagcnntttttttttttttttttttttttttttttt

SEQ ID NO: 748 - DNA, 84 bp, synthetic construct
  source 1..84: mol_type = other DNA
tttttttaagcagtggtatcaacgcagagtacnnggttagtgnngaacacgtnntttttttttttttttttttttttttttttt

SEQ ID NO: 749 - DNA, 84 bp, synthetic construct
  source 1..84: mol_type = other DNA
tttttttaagcagtggtatcaacgcagagtacnnggttagtgnnggtcttcanntttttttttttttttttttttttttttttt

SEQ ID NO: 750 - DNA, 84 bp, synthetic construct
  source 1..84: mol_type = other DNA
tttttttaagcagtggtatcaacgcagagtacnnggttagtgnnaggttcagnntttttttttttttttttttttttttttttt

SEQ ID NO: 751 - DNA, 84 bp, synthetic construct
  source 1..84: mol_type = other DNA
tttttttaagcagtggtatcaacgcagagtacnnggttagtgnnctagagcanntttttttttttttttttttttttttttttt

SEQ ID NO: 752 - DNA, 84 bp, synthetic construct
  source 1..84: mol_type = other DNA
tttttttaagcagtggtatcaacgcagagtacnnggttagtgnncttctagcnntttttttttttttttttttttttttttttt

SEQ ID NO: 753 - DNA, 84 bp, synthetic construct
  source 1..84: mol_type = other DNA
tttttttaagcagtggtatcaacgcagagtacnnggttagtgnngagtaacgnntttttttttttttttttttttttttttttt

SEQ ID NO: 754 - DNA, 84 bp, synthetic construct
  source 1..84: mol_type = other DNA
tttttttaagcagtggtatcaacgcagagtacnnggttagtgnnctaagaggnntttttttttttttttttttttttttttttt

SEQ ID NO: 755 - DNA, 84 bp, synthetic construct
  source 1..84: mol_type = other DNA
tttttttaagcagtggtatcaacgcagagtacnnggttagtgnnacgtgtagnntttttttttttttttttttttttttttttt

SEQ ID NO: 756 - DNA, 84 bp, synthetic construct
  source 1..84: mol_type = other DNA
tttttttaagcagtggtatcaacgcagagtacnnggttagtgnnactacaggnntttttttttttttttttttttttttttttt

SEQ ID NO: 757 - DNA, 84 bp, synthetic construct
  source 1..84: mol_type = other DNA
tttttttaagcagtggtatcaacgcagagtacnnggttagtgnntacaggtcnntttttttttttttttttttttttttttttt

SEQ ID NO: 758 - DNA, 84 bp, synthetic construct
  source 1..84: mol_type = other DNA
tttttttaagcagtggtatcaacgcagagtacnnggttagtgnnctcacatgnntttttttttttttttttttttttttttttt

SEQ ID NO: 759 - DNA, 84 bp, synthetic construct
  source 1..84: mol_type = other DNA
tttttttaagcagtggtatcaacgcagagtacnnggttagtgnnactaggagnntttttttttttttttttttttttttttttt

SEQ ID NO: 760 - DNA, 84 bp, synthetic construct
  source 1..84: mol_type = other DNA
tttttttaagcagtggtatcaacgcagagtacnnggttagtgnnccatagganntttttttttttttttttttttttttttttt

SEQ ID NO: 761 - DNA, 84 bp, synthetic construct
  source 1..84: mol_type = other DNA
tttttttaagcagtggtatcaacgcagagtacnnggttagtgnnggagaatcnntttttttttttttttttttttttttttttt

SEQ ID NO: 762 - DNA, 84 bp, synthetic construct
  source 1..84: mol_type = other DNA
tttttttaagcagtggtatcaacgcagagtacnnggttagtgnngccaagaanntttttttttttttttttttttttttttttt

SEQ ID NO: 763 - DNA, 84 bp, synthetic construct
  source 1..84: mol_type = other DNA
tttttttaagcagtggtatcaacgcagagtacnnggttagtgnnaaggcaagnntttttttttttttttttttttttttttttt

SEQ ID NO: 764 - DNA, 84 bp, synthetic construct
  source 1..84: mol_type = other DNA
tttttttaagcagtggtatcaacgcagagtacnnggttagtgnnaatgtcgcnntttttttttttttttttttttttttttttt

SEQ ID NO: 765 - DNA, 84 bp, synthetic construct
  source 1..84: mol_type = other DNA
tttttttaagcagtggtatcaacgcagagtacnnggttagtgnnatggaaccnntttttttttttttttttttttttttttttt

SEQ ID NO: 766 - DNA, 84 bp, synthetic construct
  source 1..84: mol_type = other DNA
tttttttaagcagtggtatcaacgcagagtacnnggttagtgnnagaggcatnntttttttttttttttttttttttttttttt

SEQ ID NO: 767 - DNA, 84 bp, synthetic construct
  source 1..84: mol_type = other DNA
tttttttaagcagtggtatcaacgcagagtacnnggttagtgnntgcatagcnntttttttttttttttttttttttttttttt

SEQ ID NO: 768 - DNA, 84 bp, synthetic construct
  source 1..84: mol_type = other DNA
tttttttaagcagtggtatcaacgcagagtacnnggttagtgnnctaacgganntttttttttttttttttttttttttttttt

SEQ ID NO: 769 - DNA, 84 bp, synthetic construct
  source 1..84: mol_type = other DNA
tttttttaagcagtggtatcaacgcagagtacnnggttagtgnntatcgaggnntttttttttttttttttttttttttttttt

SEQ ID NO: 770 - DNA, 84 bp, synthetic construct
  source 1..84: mol_type = other DNA
tttttttaagcagtggtatcaacgcagagtacnnggttagtgnncatagcctnntttttttttttttttttttttttttttttt

SEQ ID NO: 771 - DNA, 84 bp, synthetic construct
  source 1..84: mol_type = other DNA
tttttttaagcagtggtatcaacgcagagtacnnggttagtgnnatcgagacnntttttttttttttttttttttttttttttt

SEQ ID NO: 772 - DNA, 84 bp, synthetic construct
  source 1..84: mol_type = other DNA
tttttttaagcagtggtatcaacgcagagtacnnggttagtgnnggaagagtnntttttttttttttttttttttttttttttt

SEQ ID NO: 773 - DNA, 84 bp, synthetic construct
  source 1..84: mol_type = other DNA
tttttttaagcagtggtatcaacgcagagtacnnggttagtgnnccaagtagnntttttttttttttttttttttttttttttt

SEQ ID NO: 774 - DNA, 84 bp, synthetic construct
  source 1..84: mol_type = other DNA
tttttttaagcagtggtatcaacgcagagtacnnggttagtgnnctgaacagnntttttttttttttttttttttttttttttt

SEQ ID NO: 775 - DNA, 84 bp, synthetic construct
  source 1..84: mol_type = other DNA
tttttttaagcagtggtatcaacgcagagtacnnggttagtgnngtaggttcnntttttttttttttttttttttttttttttt

SEQ ID NO: 776 - DNA, 84 bp, synthetic construct
  source 1..84: mol_type = other DNA
tttttttaagcagtggtatcaacgcagagtacnnggttagtgnngtatggacnntttttttttttttttttttttttttttttt

SEQ ID NO: 777 - DNA, 84 bp, synthetic construct
  source 1..84: mol_type = other DNA
tttttttaagcagtggtatcaacgcagagtacnnggttagtgnntcgcaacanntttttttttttttttttttttttttttttt

SEQ ID NO: 778 - DNA, 84 bp, synthetic construct
  source 1..84: mol_type = other DNA
tttttttaagcagtggtatcaacgcagagtacnnggttagtgnnccgctaatnntttttttttttttttttttttttttttttt

SEQ ID NO: 779 - DNA, 84 bp, synthetic construct
  source 1..84: mol_type = other DNA
tttttttaagcagtggtatcaacgcagagtacnnggttagtgnngattcgcanntttttttttttttttttttttttttttttt

SEQ ID NO: 780 - DNA, 84 bp, synthetic construct
  source 1..84: mol_type = other DNA
tttttttaagcagtggtatcaacgcagagtacnnggttagtgnncgatggaanntttttttttttttttttttttttttttttt

SEQ ID NO: 781 - DNA, 84 bp, synthetic construct
  source 1..84: mol_type = other DNA
tttttttaagcagtggtatcaacgcagagtacnnggttagtgnnagcaagganntttttttttttttttttttttttttttttt

SEQ ID NO: 782 - DNA, 84 bp, synthetic construct
  source 1..84: mol_type = other DNA
tttttttaagcagtggtatcaacgcagagtacnnggttagtgnncgtagcaanntttttttttttttttttttttttttttttt

SEQ ID NO: 783 - DNA, 84 bp, synthetic construct
  source 1..84: mol_type = other DNA
tttttttaagcagtggtatcaacgcagagtacnnggttagtgnntggcagtanntttttttttttttttttttttttttttttt

SEQ ID NO: 784 - DNA, 84 bp, synthetic construct
  source 1..84: mol_type = other DNA
tttttttaagcagtggtatcaacgcagagtacnnggttagtgnncggtagttnntttttttttttttttttttttttttttttt

SEQ ID NO: 785 - DNA, 84 bp, synthetic construct
  source 1..84: mol_type = other DNA
tttttttaagcagtggtatcaacgcagagtacnnggttagtgnntgacttcgnntttttttttttttttttttttttttttttt

SEQ ID NO: 786 - DNA, 84 bp, synthetic construct
  source 1..84: mol_type = other DNA
tttttttaagcagtggtatcaacgcagagtacnnggttagtgnngagtgcaanntttttttttttttttttttttttttttttt

SEQ ID NO: 787 - DNA, 84 bp, synthetic construct
  source 1..84: mol_type = other DNA
tttttttaagcagtggtatcaacgcagagtacnnggttagtgnnacggtaacnntttttttttttttttttttttttttttttt

SEQ ID NO: 788 - DNA, 84 bp, synthetic construct
  source 1..84: mol_type = other DNA
tttttttaagcagtggtatcaacgcagagtacnnggttagtgnnaagtggtgnntttttttttttttttttttttttttttttt

SEQ ID NO: 789 - DNA, 84 bp, synthetic construct
  source 1..84: mol_type = other DNA
tttttttaagcagtggtatcaacgcagagtacnnggttagtgnnggagacaanntttttttttttttttttttttttttttttt

SEQ ID NO: 790 - DNA, 84 bp, synthetic construct
  source 1..84: mol_type = other DNA
tttttttaagcagtggtatcaacgcagagtacnnggttagtgnntcaaggacnntttttttttttttttttttttttttttttt

SEQ ID NO: 791 - DNA, 84 bp, synthetic construct
  source 1..84: mol_type = other DNA
tttttttaagcagtggtatcaacgcagagtacnnggttagtgnnaagagagcnntttttttttttttttttttttttttttttt

SEQ ID NO: 792 - DNA, 84 bp, synthetic construct
  source 1..84: mol_type = other DNA
tttttttaagcagtggtatcaacgcagagtacnnggttagtgnncgagagatnntttttttttttttttttttttttttttttt

SEQ ID NO: 793 - DNA, 84 bp, synthetic construct
  source 1..84: mol_type = other DNA
tttttttaagcagtggtatcaacgcagagtacnnggttagtgnnacagatggnntttttttttttttttttttttttttttttt

SEQ ID NO: 794 - DNA, 84 bp, synthetic construct
  source 1..84: mol_type = other DNA
tttttttaagcagtggtatcaacgcagagtacnnggttagtgnnaggagtcanntttttttttttttttttttttttttttttt

SEQ ID NO: 795 - DNA, 84 bp, synthetic construct
  source 1..84: mol_type = other DNA
tttttttaagcagtggtatcaacgcagagtacnnggttagtgnncgtgttacnntttttttttttttttttttttttttttttt

SEQ ID NO: 796 - DNA, 84 bp, synthetic construct
  source 1..84: mol_type = other DNA
tttttttaagcagtggtatcaacgcagagtacnnggttagtgnntagtgtgcnntttttttttttttttttttttttttttttt

SEQ ID NO: 797 - DNA, 84 bp, synthetic construct
  source 1..84: mol_type = other DNA
tttttttaagcagtggtatcaacgcagagtacnnggttagtgnnctcatgacnntttttttttttttttttttttttttttttt

SEQ ID NO: 798 - DNA, 84 bp, synthetic construct
  source 1..84: mol_type = other DNA
tttttttaagcagtggtatcaacgcagagtacnnggttagtgnngtatccagnntttttttttttttttttttttttttttttt

SEQ ID NO: 799 - DNA, 84 bp, synthetic construct
  source 1..84: mol_type = other DNA
tttttttaagcagtggtatcaacgcagagtacnnggttagtgnnacgcctatnntttttttttttttttttttttttttttttt

SEQ ID NO: 800 - DNA, 84 bp, synthetic construct
  source 1..84: mol_type = other DNA
tttttttaagcagtggtatcaacgcagagtacnnggttagtgnnaacgacctnntttttttttttttttttttttttttttttt

SEQ ID NO: 801 - DNA, 84 bp, synthetic construct
  source 1..84: mol_type = other DNA
tttttttaagcagtggtatcaacgcagagtacnnggttagtgnnatcaggctnntttttttttttttttttttttttttttttt

SEQ ID NO: 802 - DNA, 84 bp, synthetic construct
  source 1..84: mol_type = other DNA
tttttttaagcagtggtatcaacgcagagtacnnggttagtgnncaagttcgnntttttttttttttttttttttttttttttt

SEQ ID NO: 803 - DNA, 84 bp, synthetic construct
  source 1..84: mol_type = other DNA
tttttttaagcagtggtatcaacgcagagtacnnggttagtgnntagccaganntttttttttttttttttttttttttttttt

SEQ ID NO: 804 - DNA, 84 bp, synthetic construct
  source 1..84: mol_type = other DNA
tttttttaagcagtggtatcaacgcagagtacnnggttagtgnncaatcacgnntttttttttttttttttttttttttttttt

SEQ ID NO: 805 - DNA, 84 bp, synthetic construct
  source 1..84: mol_type = other DNA
tttttttaagcagtggtatcaacgcagagtacnnggttagtgnngcaacaagnntttttttttttttttttttttttttttttt

SEQ ID NO: 806 - DNA, 84 bp, synthetic construct
  source 1..84: mol_type = other DNA
tttttttaagcagtggtatcaacgcagagtacnnggttagtgnncacgacaanntttttttttttttttttttttttttttttt

SEQ ID NO: 807 - DNA, 84 bp, synthetic construct
  source 1..84: mol_type = other DNA
tttttttaagcagtggtatcaacgcagagtacnnggttagtgnntacggaganntttttttttttttttttttttttttttttt

SEQ ID NO: 808 - DNA, 84 bp, synthetic construct
  source 1..84: mol_type = other DNA
tttttttaagcagtggtatcaacgcagagtacnnggttagtgnncgacaaganntttttttttttttttttttttttttttttt

SEQ ID NO: 809 - DNA, 84 bp, synthetic construct
  source 1..84: mol_type = other DNA
tttttttaagcagtggtatcaacgcagagtacnnggttagtgnncgaagtganntttttttttttttttttttttttttttttt

SEQ ID NO: 810 - DNA, 84 bp, synthetic construct
  source 1..84: mol_type = other DNA
tttttttaagcagtggtatcaacgcagagtacnnggttagtgnnagctggtanntttttttttttttttttttttttttttttt

SEQ ID NO: 811 - DNA, 84 bp, synthetic construct
  source 1..84: mol_type = other DNA
tttttttaagcagtggtatcaacgcagagtacnnggttagtgnnaactaggcnntttttttttttttttttttttttttttttt

SEQ ID NO: 812 - DNA, 84 bp, synthetic construct
  source 1..84: mol_type = other DNA
tttttttaagcagtggtatcaacgcagagtacnnggttagtgnncagcaagtnntttttttttttttttttttttttttttttt

SEQ ID NO: 813 - DNA, 84 bp, synthetic construct
  source 1..84: mol_type = other DNA
tttttttaagcagtggtatcaacgcagagtacnnggttagtgnnacgaggtanntttttttttttttttttttttttttttttt

SEQ ID NO: 814 - DNA, 84 bp, synthetic construct
  source 1..84: mol_type = other DNA
tttttttaagcagtggtatcaacgcagagtacnnggttagtgnncatcttccnntttttttttttttttttttttttttttttt

SEQ ID NO: 815 - DNA, 84 bp, synthetic construct
  source 1..84: mol_type = other DNA
tttttttaagcagtggtatcaacgcagagtacnnggttagtgnncctgaatcnntttttttttttttttttttttttttttttt

SEQ ID NO: 816 - DNA, 84 bp, synthetic construct
  source 1..84: mol_type = other DNA
tttttttaagcagtggtatcaacgcagagtacnnggttagtgnntgcagactnntttttttttttttttttttttttttttttt

SEQ ID NO: 817 - DNA, 84 bp, synthetic construct
  source 1..84: mol_type = other DNA
tttttttaagcagtggtatcaacgcagagtacnnggttagtgnnagatgtggnntttttttttttttttttttttttttttttt

SEQ ID NO: 818 - DNA, 84 bp, synthetic construct
  source 1..84: mol_type = other DNA
tttttttaagcagtggtatcaacgcagagtacnnggttagtgnnagttcgacnntttttttttttttttttttttttttttttt

SEQ ID NO: 819 - DNA, 84 bp, synthetic construct
  source 1..84: mol_type = other DNA
tttttttaagcagtggtatcaacgcagagtacnnggttagtgnnacaacctcnntttttttttttttttttttttttttttttt

SEQ ID NO: 820 - DNA, 84 bp, synthetic construct
  source 1..84: mol_type = other DNA
tttttttaagcagtggtatcaacgcagagtacnnggttagtgnncatggtagnntttttttttttttttttttttttttttttt

SEQ ID NO: 821 - DNA, 84 bp, synthetic construct
  source 1..84: mol_type = other DNA
tttttttaagcagtggtatcaacgcagagtacnnggttagtgnncgtatctcnntttttttttttttttttttttttttttttt

SEQ ID NO: 822 - DNA, 84 bp, synthetic construct
  source 1..84: mol_type = other DNA
tttttttaagcagtggtatcaacgcagagtacnnggttagtgnncctagttcnntttttttttttttttttttttttttttttt

SEQ ID NO: 823 - DNA, 84 bp, synthetic construct
  source 1..84: mol_type = other DNA
tttttttaagcagtggtatcaacgcagagtacnnggttagtgnncaagagtcnntttttttttttttttttttttttttttttt

SEQ ID NO: 824 - DNA, 84 bp, synthetic construct
  source 1..84: mol_type = other DNA
tttttttaagcagtggtatcaacgcagagtacnnggagttagnnaatcggcanntttttttttttttttttttttttttttttt

SEQ ID NO: 825 - DNA, 84 bp, synthetic construct
  source 1..84: mol_type = other DNA
tttttttaagcagtggtatcaacgcagagtacnnggagttagnntacggcatnntttttttttttttttttttttttttttttt

SEQ ID NO: 826 - DNA, 84 bp, synthetic construct
  source 1..84: mol_type = other DNA
tttttttaagcagtggtatcaacgcagagtacnnggagttagnnttggatcgnntttttttttttttttttttttttttttttt

SEQ ID NO: 827 - DNA, 84 bp, synthetic construct
  source 1..84: mol_type = other DNA
tttttttaagcagtggtatcaacgcagagtacnnggagttagnntggaacganntttttttttttttttttttttttttttttt

SEQ ID NO: 828 - DNA, 84 bp, synthetic construct
  source 1..84: mol_type = other DNA
tttttttaagcagtggtatcaacgcagagtacnnggagttagnnggcaatcanntttttttttttttttttttttttttttttt

SEQ ID NO: 829 - DNA, 84 bp, synthetic construct
  source 1..84: mol_type = other DNA
tttttttaagcagtggtatcaacgcagagtacnnggagttagnngaatccganntttttttttttttttttttttttttttttt

SEQ ID NO: 830 - DNA, 84 bp, synthetic construct
  source 1..84: mol_type = other DNA
tttttttaagcagtggtatcaacgcagagtacnnggagttagnnttacggtgnntttttttttttttttttttttttttttttt

SEQ ID NO: 831 - DNA, 84 bp, synthetic construct
  source 1..84: mol_type = other DNA
tttttttaagcagtggtatcaacgcagagtacnnggagttagnncatatcggnntttttttttttttttttttttttttttttt

SEQ ID NO: 832 - DNA, 84 bp, synthetic construct
  source 1..84: mol_type = other DNA
tttttttaagcagtggtatcaacgcagagtacnnggagttagnncttcggtanntttttttttttttttttttttttttttttt

SEQ ID NO: 833 - DNA, 84 bp, synthetic construct
  source 1..84: mol_type = other DNA
tttttttaagcagtggtatcaacgcagagtacnnggagttagnntcctaacgnntttttttttttttttttttttttttttttt

SEQ ID NO: 834 - DNA, 84 bp, synthetic construct
  source 1..84: mol_type = other DNA
tttttttaagcagtggtatcaacgcagagtacnnggagttagnngtaagccanntttttttttttttttttttttttttttttt

SEQ ID NO: 835 - DNA, 84 bp, synthetic construct
  source 1..84: mol_type = other DNA
tttttttaagcagtggtatcaacgcagagtacnnggagttagnntaaggtggnntttttttttttttttttttttttttttttt

SEQ ID NO: 836 - DNA, 84 bp, synthetic construct
  source 1..84: mol_type = other DNA
tttttttaagcagtggtatcaacgcagagtacnnggagttagnnggtaagctnntttttttttttttttttttttttttttttt

SEQ ID NO: 837 - DNA, 84 bp, synthetic construct
  source 1..84: mol_type = other DNA
tttttttaagcagtggtatcaacgcagagtacnnggagttagnntgtgtcganntttttttttttttttttttttttttttttt

SEQ ID NO: 838 - DNA, 84 bp, synthetic construct
  source 1..84: mol_type = other DNA
tttttttaagcagtggtatcaacgcagagtacnnggagttagnngagcatganntttttttttttttttttttttttttttttt

SEQ ID NO: 839 - DNA, 84 bp, synthetic construct
  source 1..84: mol_type = other DNA
tttttttaagcagtggtatcaacgcagagtacnnggagttagnntcgaagtcnntttttttttttttttttttttttttttttt

SEQ ID NO: 840 - DNA, 84 bp, synthetic construct
  source 1..84: mol_type = other DNA
tttttttaagcagtggtatcaacgcagagtacnnggagttagnnggtgaacanntttttttttttttttttttttttttttttt

SEQ ID NO: 841 - DNA, 84 bp, synthetic construct
  source 1..84: mol_type = other DNA
tttttttaagcagtggtatcaacgcagagtacnnggagttagnnacatgcacnntttttttttttttttttttttttttttttt

SEQ ID NO: 842 - DNA, 84 bp, synthetic construct
  source 1..84: mol_type = other DNA
tttttttaagcagtggtatcaacgcagagtacnnggagttagnnccaacagtnntttttttttttttttttttttttttttttt

SEQ ID NO: 843 - DNA, 84 bp, synthetic construct
  source 1..84: mol_type = other DNA
tttttttaagcagtggtatcaacgcagagtacnnggagttagnnagaacagcnntttttttttttttttttttttttttttttt

SEQ ID NO: 844 - DNA, 84 bp, synthetic construct
  source 1..84: mol_type = other DNA
tttttttaagcagtggtatcaacgcagagtacnnggagttagnngaacacgtnntttttttttttttttttttttttttttttt

SEQ ID NO: 845 - DNA, 84 bp, synthetic construct
  source 1..84: mol_type = other DNA
tttttttaagcagtggtatcaacgcagagtacnnggagttagnnggtcttcanntttttttttttttttttttttttttttttt

SEQ ID NO: 846 - DNA, 84 bp, synthetic construct
  source 1..84: mol_type = other DNA
tttttttaagcagtggtatcaacgcagagtacnnggagttagnnaggttcagnntttttttttttttttttttttttttttttt

SEQ ID NO: 847 - DNA, 84 bp, synthetic construct
  source 1..84: mol_type = other DNA
tttttttaagcagtggtatcaacgcagagtacnnggagttagnnctagagcanntttttttttttttttttttttttttttttt

SEQ ID NO: 848 - DNA, 84 bp, synthetic construct
  source 1..84: mol_type = other DNA
tttttttaagcagtggtatcaacgcagagtacnnggagttagnncttctagcnntttttttttttttttttttttttttttttt

SEQ ID NO: 849 - DNA, 84 bp, synthetic construct
  source 1..84: mol_type = other DNA
tttttttaagcagtggtatcaacgcagagtacnnggagttagnngagtaacgnntttttttttttttttttttttttttttttt

SEQ ID NO: 850 - DNA, 84 bp, synthetic construct
  source 1..84: mol_type = other DNA
tttttttaagcagtggtatcaacgcagagtacnnggagttagnnctaagaggnntttttttttttttttttttttttttttttt

SEQ ID NO: 851 - DNA, 84 bp, synthetic construct
  source 1..84: mol_type = other DNA
tttttttaagcagtggtatcaacgcagagtacnnggagttagnnacgtgtagnntttttttttttttttttttttttttttttt

SEQ ID NO: 852 - DNA, 84 bp, synthetic construct
  source 1..84: mol_type = other DNA
tttttttaagcagtggtatcaacgcagagtacnnggagttagnnactacaggnntttttttttttttttttttttttttttttt

SEQ ID NO: 853 - DNA, 84 bp, synthetic construct
  source 1..84: mol_type = other DNA
tttttttaagcagtggtatcaacgcagagtacnnggagttagnntacaggtcnntttttttttttttttttttttttttttttt

SEQ ID NO: 854 - DNA, 84 bp, synthetic construct
  source 1..84: mol_type = other DNA
tttttttaagcagtggtatcaacgcagagtacnnggagttagnnctcacatgnntttttttttttttttttttttttttttttt

SEQ ID NO: 855 - DNA, 84 bp, synthetic construct
  source 1..84: mol_type = other DNA
tttttttaagcagtggtatcaacgcagagtacnnggagttagnnactaggagnntttttttttttttttttttttttttttttt

SEQ ID NO: 856 - DNA, 84 bp, synthetic construct
  source 1..84: mol_type = other DNA
tttttttaagcagtggtatcaacgcagagtacnnggagttagnnccatagganntttttttttttttttttttttttttttttt

SEQ ID NO: 857 - DNA, 84 bp, synthetic construct
  source 1..84: mol_type = other DNA
tttttttaagcagtggtatcaacgcagagtacnnggagttagnnggagaatcnntttttttttttttttttttttttttttttt

SEQ ID NO: 858 - DNA, 84 bp, synthetic construct
  source 1..84: mol_type = other DNA
tttttttaagcagtggtatcaacgcagagtacnnggagttagnngccaagaanntttttttttttttttttttttttttttttt

SEQ ID NO: 859 - DNA, 84 bp, synthetic construct
  source 1..84: mol_type = other DNA
tttttttaagcagtggtatcaacgcagagtacnnggagttagnnaaggcaagnntttttttttttttttttttttttttttttt

SEQ ID NO: 860 - DNA, 84 bp, synthetic construct
  source 1..84: mol_type = other DNA
tttttttaagcagtggtatcaacgcagagtacnnggagttagnnaatgtcgcnntttttttttttttttttttttttttttttt

SEQ ID NO: 861 - DNA, 84 bp, synthetic construct
  source 1..84: mol_type = other DNA
tttttttaagcagtggtatcaacgcagagtacnnggagttagnnatggaaccnntttttttttttttttttttttttttttttt

SEQ ID NO: 862 - DNA, 84 bp, synthetic construct
  source 1..84: mol_type = other DNA
tttttttaagcagtggtatcaacgcagagtacnnggagttagnnagaggcatnntttttttttttttttttttttttttttttt

SEQ ID NO: 863 - DNA, 84 bp, synthetic construct
  source 1..84: mol_type = other DNA
tttttttaagcagtggtatcaacgcagagtacnnggagttagnntgcatagcnntttttttttttttttttttttttttttttt

SEQ ID NO: 864 - DNA, 84 bp, synthetic construct
  source 1..84: mol_type = other DNA
tttttttaagcagtggtatcaacgcagagtacnnggagttagnnctaacgganntttttttttttttttttttttttttttttt

SEQ ID NO: 865 - DNA, 84 bp, synthetic construct
  source 1..84: mol_type = other DNA
tttttttaagcagtggtatcaacgcagagtacnnggagttagnntatcgaggnntttttttttttttttttttttttttttttt

SEQ ID NO: 866 - DNA, 84 bp, synthetic construct
  source 1..84: mol_type = other DNA
tttttttaagcagtggtatcaacgcagagtacnnggagttagnncatagcctnntttttttttttttttttttttttttttttt

SEQ ID NO: 867 - DNA, 84 bp, synthetic construct
  source 1..84: mol_type = other DNA
tttttttaagcagtggtatcaacgcagagtacnnggagttagnnatcgagacnntttttttttttttttttttttttttttttt

SEQ ID NO: 868 - DNA, 84 bp, synthetic construct
  source 1..84: mol_type = other DNA
tttttttaagcagtggtatcaacgcagagtacnnggagttagnnggaagagtnntttttttttttttttttttttttttttttt

SEQ ID NO: 869 - DNA, 84 bp, synthetic construct
  source 1..84: mol_type = other DNA
tttttttaagcagtggtatcaacgcagagtacnnggagttagnnccaagtagnntttttttttttttttttttttttttttttt

SEQ ID NO: 870 - DNA, 84 bp, synthetic construct
  source 1..84: mol_type = other DNA
tttttttaagcagtggtatcaacgcagagtacnnggagttagnnctgaacagnntttttttttttttttttttttttttttttt

SEQ ID NO: 871 - DNA, 84 bp, synthetic construct
  source 1..84: mol_type = other DNA
tttttttaagcagtggtatcaacgcagagtacnnggagttagnngtaggttcnntttttttttttttttttttttttttttttt

SEQ ID NO: 872 - DNA, 84 bp, synthetic construct
  source 1..84: mol_type = other DNA
tttttttaagcagtggtatcaacgcagagtacnnggagttagnngtatggacnntttttttttttttttttttttttttttttt

SEQ ID NO: 873 - DNA, 84 bp, synthetic construct
  source 1..84: mol_type = other DNA
tttttttaagcagtggtatcaacgcagagtacnnggagttagnntcgcaacanntttttttttttttttttttttttttttttt

SEQ ID NO: 874 - DNA, 84 bp, synthetic construct
  source 1..84: mol_type = other DNA
tttttttaagcagtggtatcaacgcagagtacnnggagttagnnccgctaatnntttttttttttttttttttttttttttttt

SEQ ID NO: 875 - DNA, 84 bp, synthetic construct
  source 1..84: mol_type = other DNA
tttttttaagcagtggtatcaacgcagagtacnnggagttagnngattcgcanntttttttttttttttttttttttttttttt

SEQ ID NO: 876 - DNA, 84 bp, synthetic construct
  source 1..84: mol_type = other DNA
tttttttaagcagtggtatcaacgcagagtacnnggagttagnncgatggaanntttttttttttttttttttttttttttttt

SEQ ID NO: 877 - DNA, 84 bp, synthetic construct
  source 1..84: mol_type = other DNA
tttttttaagcagtggtatcaacgcagagtacnnggagttagnnagcaagganntttttttttttttttttttttttttttttt

SEQ ID NO: 878 - DNA, 84 bp, synthetic construct
  source 1..84: mol_type = other DNA
tttttttaagcagtggtatcaacgcagagtacnnggagttagnncgtagcaanntttttttttttttttttttttttttttttt

SEQ ID NO: 879 - DNA, 84 bp, synthetic construct
  source 1..84: mol_type = other DNA
tttttttaagcagtggtatcaacgcagagtacnnggagttagnntggcagtanntttttttttttttttttttttttttttttt

SEQ ID NO: 880 - DNA, 84 bp, synthetic construct
  source 1..84: mol_type = other DNA
tttttttaagcagtggtatcaacgcagagtacnnggagttagnncggtagttnntttttttttttttttttttttttttttttt

SEQ ID NO: 881 - DNA, 84 bp, synthetic construct
  source 1..84: mol_type = other DNA
tttttttaagcagtggtatcaacgcagagtacnnggagttagnntgacttcgnntttttttttttttttttttttttttttttt

SEQ ID NO: 882 - DNA, 84 bp, synthetic construct
  source 1..84: mol_type = other DNA
tttttttaagcagtggtatcaacgcagagtacnnggagttagnngagtgcaanntttttttttttttttttttttttttttttt

SEQ ID NO: 883 - DNA, 84 bp, synthetic construct
  source 1..84: mol_type = other DNA
tttttttaagcagtggtatcaacgcagagtacnnggagttagnnacggtaacnntttttttttttttttttttttttttttttt

SEQ ID NO: 884 - DNA, 84 bp, synthetic construct
  source 1..84: mol_type = other DNA
tttttttaagcagtggtatcaacgcagagtacnnggagttagnnaagtggtgnntttttttttttttttttttttttttttttt

SEQ ID NO: 885 - DNA, 84 bp, synthetic construct
  source 1..84: mol_type = other DNA
tttttttaagcagtggtatcaacgcagagtacnnggagttagnnggagacaanntttttttttttttttttttttttttttttt

SEQ ID NO: 886 - DNA, 84 bp, synthetic construct
  source 1..84: mol_type = other DNA
tttttttaagcagtggtatcaacgcagagtacnnggagttagnntcaaggacnntttttttttttttttttttttttttttttt

SEQ ID NO: 887 - DNA, 84 bp, synthetic construct
  source 1..84: mol_type = other DNA
tttttttaagcagtggtatcaacgcagagtacnnggagttagnnaagagagcnntttttttttttttttttttttttttttttt

SEQ ID NO: 888 - DNA, 84 bp, synthetic construct
  source 1..84: mol_type = other DNA
tttttttaagcagtggtatcaacgcagagtacnnggagttagnncgagagatnntttttttttttttttttttttttttttttt

SEQ ID NO: 889 - DNA, 84 bp, synthetic construct
  source 1..84: mol_type = other DNA
tttttttaagcagtggtatcaacgcagagtacnnggagttagnnacagatggnntttttttttttttttttttttttttttttt

SEQ ID NO: 890 - DNA, 84 bp, synthetic construct
  source 1..84: mol_type = other DNA
tttttttaagcagtggtatcaacgcagagtacnnggagttagnnaggagtcanntttttttttttttttttttttttttttttt

SEQ ID NO: 891 - DNA, 84 bp, synthetic construct
  source 1..84: mol_type = other DNA
tttttttaagcagtggtatcaacgcagagtacnnggagttagnncgtgttacnntttttttttttttttttttttttttttttt

SEQ ID NO: 892 - DNA, 84 bp, synthetic construct
  source 1..84: mol_type = other DNA
tttttttaagcagtggtatcaacgcagagtacnnggagttagnntagtgtgcnntttttttttttttttttttttttttttttt

SEQ ID NO: 893 - DNA, 84 bp, synthetic construct
  source 1..84: mol_type = other DNA
tttttttaagcagtggtatcaacgcagagtacnnggagttagnnctcatgacnntttttttttttttttttttttttttttttt

SEQ ID NO: 894 - DNA, 84 bp, synthetic construct
  source 1..84: mol_type = other DNA
tttttttaagcagtggtatcaacgcagagtacnnggagttagnngtatccagnntttttttttttttttttttttttttttttt

SEQ ID NO: 895 - DNA, 84 bp, synthetic construct
  source 1..84: mol_type = other DNA
tttttttaagcagtggtatcaacgcagagtacnnggagttagnnacgcctatnntttttttttttttttttttttttttttttt

SEQ ID NO: 896 - DNA, 84 bp, synthetic construct
  source 1..84: mol_type = other DNA
tttttttaagcagtggtatcaacgcagagtacnnggagttagnnaacgacctnntttttttttttttttttttttttttttttt

SEQ ID NO: 897 - DNA, 84 bp, synthetic construct
  source 1..84: mol_type = other DNA
tttttttaagcagtggtatcaacgcagagtacnnggagttagnnatcaggctnntttttttttttttttttttttttttttttt

SEQ ID NO: 898 - DNA, 84 bp, synthetic construct
  source 1..84: mol_type = other DNA
tttttttaagcagtggtatcaacgcagagtacnnggagttagnncaagttcgnntttttttttttttttttttttttttttttt

SEQ ID NO: 899 - DNA, 84 bp, synthetic construct
  source 1..84: mol_type = other DNA
tttttttaagcagtggtatcaacgcagagtacnnggagttagnntagccaganntttttttttttttttttttttttttttttt

SEQ ID NO: 900 - DNA, 84 bp, synthetic construct
  source 1..84: mol_type = other DNA
tttttttaagcagtggtatcaacgcagagtacnnggagttagnncaatcacgnntttttttttttttttttttttttttttttt

SEQ ID NO: 901 - DNA, 84 bp, synthetic construct
  source 1..84: mol_type = other DNA
tttttttaagcagtggtatcaacgcagagtacnnggagttagnngcaacaagnntttttttttttttttttttttttttttttt

SEQ ID NO: 902 - DNA, 84 bp, synthetic construct
  source 1..84: mol_type = other DNA
tttttttaagcagtggtatcaacgcagagtacnnggagttagnncacgacaanntttttttttttttttttttttttttttttt

SEQ ID NO: 903 - DNA, 84 bp, synthetic construct
  source 1..84: mol_type = other DNA
tttttttaagcagtggtatcaacgcagagtacnnggagttagnntacggaganntttttttttttttttttttttttttttttt

SEQ ID NO: 904 - DNA, 84 bp, synthetic construct
  source 1..84: mol_type = other DNA
tttttttaagcagtggtatcaacgcagagtacnnggagttagnncgacaaganntttttttttttttttttttttttttttttt

SEQ ID NO: 905 - DNA, 84 bp, synthetic construct
  source 1..84: mol_type = other DNA
tttttttaagcagtggtatcaacgcagagtacnnggagttagnncgaagtganntttttttttttttttttttttttttttttt

SEQ ID NO: 906 - DNA, 84 bp, synthetic construct
  source 1..84: mol_type = other DNA
tttttttaagcagtggtatcaacgcagagtacnnggagttagnnagctggtanntttttttttttttttttttttttttttttt

SEQ ID NO: 907 - DNA, 84 bp, synthetic construct
  source 1..84: mol_type = other DNA
tttttttaagcagtggtatcaacgcagagtacnnggagttagnnaactaggcnntttttttttttttttttttttttttttttt

SEQ ID NO: 908 - DNA, 84 bp, synthetic construct
  source 1..84: mol_type = other DNA
tttttttaagcagtggtatcaacgcagagtacnnggagttagnncagcaagtnntttttttttttttttttttttttttttttt

SEQ ID NO: 909 - DNA, 84 bp, synthetic construct
  source 1..84: mol_type = other DNA
tttttttaagcagtggtatcaacgcagagtacnnggagttagnnacgaggtanntttttttttttttttttttttttttttttt

SEQ ID NO: 910 - DNA, 84 bp, synthetic construct
  source 1..84: mol_type = other DNA
tttttttaagcagtggtatcaacgcagagtacnnggagttagnncatcttccnntttttttttttttttttttttttttttttt

SEQ ID NO: 911 - DNA, 84 bp, synthetic construct
  source 1..84: mol_type = other DNA
tttttttaagcagtggtatcaacgcagagtacnnggagttagnncctgaatcnntttttttttttttttttttttttttttttt

SEQ ID NO: 912 - DNA, 84 bp, synthetic construct
  source 1..84: mol_type = other DNA
tttttttaagcagtggtatcaacgcagagtacnnggagttagnntgcagactnntttttttttttttttttttttttttttttt

SEQ ID NO: 913 - DNA, 84 bp, synthetic construct
  source 1..84: mol_type = other DNA
tttttttaagcagtggtatcaacgcagagtacnnggagttagnnagatgtggnntttttttttttttttttttttttttttttt

SEQ ID NO: 914 - DNA, 84 bp, synthetic construct
  source 1..84: mol_type = other DNA
tttttttaagcagtggtatcaacgcagagtacnnggagttagnnagttcgacnntttttttttttttttttttttttttttttt

SEQ ID NO: 915 - DNA, 84 bp, synthetic construct
  source 1..84: mol_type = other DNA
tttttttaagcagtggtatcaacgcagagtacnnggagttagnnacaacctcnntttttttttttttttttttttttttttttt

SEQ ID NO: 916 - DNA, 84 bp, synthetic construct
  source 1..84: mol_type = other DNA
tttttttaagcagtggtatcaacgcagagtacnnggagttagnncatggtagnntttttttttttttttttttttttttttttt

SEQ ID NO: 917 - DNA, 84 bp, synthetic construct
  source 1..84: mol_type = other DNA
tttttttaagcagtggtatcaacgcagagtacnnggagttagnncgtatctcnntttttttttttttttttttttttttttttt

SEQ ID NO: 918 - DNA, 84 bp, synthetic construct
  source 1..84: mol_type = other DNA
tttttttaagcagtggtatcaacgcagagtacnnggagttagnncctagttcnntttttttttttttttttttttttttttttt

SEQ ID NO: 919 - DNA, 84 bp, synthetic construct
  source 1..84: mol_type = other DNA
tttttttaagcagtggtatcaacgcagagtacnnggagttagnncaagagtcnntttttttttttttttttttttttttttttt

SEQ ID NO: 920 - DNA, 84 bp, synthetic construct
  source 1..84: mol_type = other DNA
tttttttaagcagtggtatcaacgcagagtacnntgtgtgtgnnaatcggcanntttttttttttttttttttttttttttttt

SEQ ID NO: 921 - DNA, 84 bp, synthetic construct
  source 1..84: mol_type = other DNA
tttttttaagcagtggtatcaacgcagagtacnntgtgtgtgnntacggcatnntttttttttttttttttttttttttttttt

SEQ ID NO: 922 - DNA, 84 bp, synthetic construct
  source 1..84: mol_type = other DNA
tttttttaagcagtggtatcaacgcagagtacnntgtgtgtgnnttggatcgnntttttttttttttttttttttttttttttt

SEQ ID NO: 923 - DNA, 84 bp, synthetic construct
  source 1..84: mol_type = other DNA
tttttttaagcagtggtatcaacgcagagtacnntgtgtgtgnntggaacganntttttttttttttttttttttttttttttt

SEQ ID NO: 924 - DNA, 84 bp, synthetic construct
  source 1..84: mol_type = other DNA
tttttttaagcagtggtatcaacgcagagtacnntgtgtgtgnnggcaatcanntttttttttttttttttttttttttttttt

SEQ ID NO: 925 - DNA, 84 bp, synthetic construct
  source 1..84: mol_type = other DNA
tttttttaagcagtggtatcaacgcagagtacnntgtgtgtgnngaatccganntttttttttttttttttttttttttttttt

SEQ ID NO: 926 - DNA, 84 bp, synthetic construct
  source 1..84: mol_type = other DNA
tttttttaagcagtggtatcaacgcagagtacnntgtgtgtgnnttacggtgnntttttttttttttttttttttttttttttt

SEQ ID NO: 927 - DNA, 84 bp, synthetic construct
  source 1..84: mol_type = other DNA
tttttttaagcagtggtatcaacgcagagtacnntgtgtgtgnncatatcggnntttttttttttttttttttttttttttttt

SEQ ID NO: 928 - DNA, 84 bp, synthetic construct
  source 1..84: mol_type = other DNA
tttttttaagcagtggtatcaacgcagagtacnntgtgtgtgnncttcggtanntttttttttttttttttttttttttttttt

SEQ ID NO: 929 - DNA, 84 bp, synthetic construct
  source 1..84: mol_type = other DNA
tttttttaagcagtggtatcaacgcagagtacnntgtgtgtgnntcctaacgnntttttttttttttttttttttttttttttt

SEQ ID NO: 930 - DNA, 84 bp, synthetic construct
  source 1..84: mol_type = other DNA
tttttttaagcagtggtatcaacgcagagtacnntgtgtgtgnngtaagccanntttttttttttttttttttttttttttttt

SEQ ID NO: 931 - DNA, 84 bp, synthetic construct
  source 1..84: mol_type = other DNA
tttttttaagcagtggtatcaacgcagagtacnntgtgtgtgnntaaggtggnntttttttttttttttttttttttttttttt

SEQ ID NO: 932 - DNA, 84 bp, synthetic construct
  source 1..84: mol_type = other DNA
tttttttaagcagtggtatcaacgcagagtacnntgtgtgtgnnggtaagctnntttttttttttttttttttttttttttttt

SEQ ID NO: 933 - DNA, 84 bp, synthetic construct
  source 1..84: mol_type = other DNA
tttttttaagcagtggtatcaacgcagagtacnntgtgtgtgnntgtgtcganntttttttttttttttttttttttttttttt

SEQ ID NO: 934 - DNA, 84 bp, synthetic construct
  source 1..84: mol_type = other DNA
tttttttaagcagtggtatcaacgcagagtacnntgtgtgtgnngagcatganntttttttttttttttttttttttttttttt

SEQ ID NO: 935 - DNA, 84 bp, synthetic construct
  source 1..84: mol_type = other DNA
tttttttaagcagtggtatcaacgcagagtacnntgtgtgtgnntcgaagtcnntttttttttttttttttttttttttttttt

SEQ ID NO: 936 - DNA, 84 bp, synthetic construct
  source 1..84: mol_type = other DNA
tttttttaagcagtggtatcaacgcagagtacnntgtgtgtgnnggtgaacanntttttttttttttttttttttttttttttt

SEQ ID NO: 937 - DNA, 84 bp, synthetic construct
  source 1..84: mol_type = other DNA
tttttttaagcagtggtatcaacgcagagtacnntgtgtgtgnnacatgcacnntttttttttttttttttttttttttttttt

SEQ ID NO: 938 - DNA, 84 bp, synthetic construct
  source 1..84: mol_type = other DNA
tttttttaagcagtggtatcaacgcagagtacnntgtgtgtgnnccaacagtnntttttttttttttttttttttttttttttt

SEQ ID NO: 939 - DNA, 84 bp, synthetic construct
  source 1..84: mol_type = other DNA
tttttttaagcagtggtatcaacgcagagtacnntgtgtgtgnnagaacagcnntttttttttttttttttttttttttttttt

SEQ ID NO: 940 - DNA, 84 bp, synthetic construct
  source 1..84: mol_type = other DNA
tttttttaagcagtggtatcaacgcagagtacnntgtgtgtgnngaacacgtnntttttttttttttttttttttttttttttt

SEQ ID NO: 941 - DNA, 84 bp, synthetic construct
  source 1..84: mol_type = other DNA
tttttttaagcagtggtatcaacgcagagtacnntgtgtgtgnnggtcttcanntttttttttttttttttttttttttttttt

SEQ ID NO: 942 - DNA, 84 bp, synthetic construct
  source 1..84: mol_type = other DNA
tttttttaagcagtggtatcaacgcagagtacnntgtgtgtgnnaggttcagnntttttttttttttttttttttttttttttt

SEQ ID NO: 943 - DNA, 84 bp, synthetic construct
  source 1..84: mol_type = other DNA
tttttttaagcagtggtatcaacgcagagtacnntgtgtgtgnnctagagcanntttttttttttttttttttttttttttttt

SEQ ID NO: 944 - DNA, 84 bp, synthetic construct
  source 1..84: mol_type = other DNA
tttttttaagcagtggtatcaacgcagagtacnntgtgtgtgnncttctagcnntttttttttttttttttttttttttttttt

SEQ ID NO: 945 - DNA, 84 bp, synthetic construct
  source 1..84: mol_type = other DNA
tttttttaagcagtggtatcaacgcagagtacnntgtgtgtgnngagtaacgnntttttttttttttttttttttttttttttt

SEQ ID NO: 946 - DNA, 84 bp, synthetic construct
  source 1..84: mol_type = other DNA
tttttttaagcagtggtatcaacgcagagtacnntgtgtgtgnnctaagaggnntttttttttttttttttttttttttttttt

SEQ ID NO: 947 - DNA, 84 bp, synthetic construct
  source 1..84: mol_type = other DNA
tttttttaagcagtggtatcaacgcagagtacnntgtgtgtgnnacgtgtagnntttttttttttttttttttttttttttttt

SEQ ID NO: 948 - DNA, 84 bp, synthetic construct
  source 1..84: mol_type = other DNA
tttttttaagcagtggtatcaacgcagagtacnntgtgtgtgnnactacaggnntttttttttttttttttttttttttttttt

SEQ ID NO: 949 - DNA, 84 bp, synthetic construct
  source 1..84: mol_type = other DNA
tttttttaagcagtggtatcaacgcagagtacnntgtgtgtgnntacaggtcnntttttttttttttttttttttttttttttt

SEQ ID NO: 950 - DNA, 84 bp, synthetic construct
  source 1..84: mol_type = other DNA
tttttttaagcagtggtatcaacgcagagtacnntgtgtgtgnnctcacatgnntttttttttttttttttttttttttttttt

SEQ ID NO: 951 - DNA, 84 bp, synthetic construct
  source 1..84: mol_type = other DNA
tttttttaagcagtggtatcaacgcagagtacnntgtgtgtgnnactaggagnntttttttttttttttttttttttttttttt

SEQ ID NO: 952 - DNA, 84 bp, synthetic construct
  source 1..84: mol_type = other DNA
tttttttaagcagtggtatcaacgcagagtacnntgtgtgtgnnccatagganntttttttttttttttttttttttttttttt

SEQ ID NO: 953 - DNA, 84 bp, synthetic construct
  source 1..84: mol_type = other DNA
tttttttaagcagtggtatcaacgcagagtacnntgtgtgtgnnggagaatcnntttttttttttttttttttttttttttttt

SEQ ID NO: 954 - DNA, 84 bp, synthetic construct
  source 1..84: mol_type = other DNA
tttttttaagcagtggtatcaacgcagagtacnntgtgtgtgnngccaagaanntttttttttttttttttttttttttttttt

SEQ ID NO: 955 - DNA, 84 bp, synthetic construct
  source 1..84: mol_type = other DNA
tttttttaagcagtggtatcaacgcagagtacnntgtgtgtgnnaaggcaagnntttttttttttttttttttttttttttttt

SEQ ID NO: 956 - DNA, 84 bp, synthetic construct
  source 1..84: mol_type = other DNA
tttttttaagcagtggtatcaacgcagagtacnntgtgtgtgnnaatgtcgcnntttttttttttttttttttttttttttttt

SEQ ID NO: 957 - DNA, 84 bp, synthetic construct
  source 1..84: mol_type = other DNA
tttttttaagcagtggtatcaacgcagagtacnntgtgtgtgnnatggaaccnntttttttttttttttttttttttttttttt

SEQ ID NO: 958 - DNA, 84 bp, synthetic construct
  source 1..84: mol_type = other DNA
tttttttaagcagtggtatcaacgcagagtacnntgtgtgtgnnagaggcatnntttttttttttttttttttttttttttttt

SEQ ID NO: 959 - DNA, 84 bp, synthetic construct
  source 1..84: mol_type = other DNA
tttttttaagcagtggtatcaacgcagagtacnntgtgtgtgnntgcatagcnntttttttttttttttttttttttttttttt

SEQ ID NO: 960 - DNA, 84 bp, synthetic construct
  source 1..84: mol_type = other DNA
tttttttaagcagtggtatcaacgcagagtacnntgtgtgtgnnctaacgganntttttttttttttttttttttttttttttt

SEQ ID NO: 961 - DNA, 84 bp, synthetic construct
  source 1..84: mol_type = other DNA
tttttttaagcagtggtatcaacgcagagtacnntgtgtgtgnntatcgaggnntttttttttttttttttttttttttttttt

SEQ ID NO: 962 - DNA, 84 bp, synthetic construct
  source 1..84: mol_type = other DNA
tttttttaagcagtggtatcaacgcagagtacnntgtgtgtgnncatagcctnntttttttttttttttttttttttttttttt

SEQ ID NO: 963 - DNA, 84 bp, synthetic construct
  source 1..84: mol_type = other DNA
tttttttaagcagtggtatcaacgcagagtacnntgtgtgtgnnatcgagacnntttttttttttttttttttttttttttttt

SEQ ID NO: 964 - DNA, 84 bp, synthetic construct
  source 1..84: mol_type = other DNA
tttttttaagcagtggtatcaacgcagagtacnntgtgtgtgnnggaagagtnntttttttttttttttttttttttttttttt

SEQ ID NO: 965 - DNA, 84 bp, synthetic construct
  source 1..84: mol_type = other DNA
tttttttaagcagtggtatcaacgcagagtacnntgtgtgtgnnccaagtagnntttttttttttttttttttttttttttttt

SEQ ID NO: 966 - DNA, 84 bp, synthetic construct
  source 1..84: mol_type = other DNA
tttttttaagcagtggtatcaacgcagagtacnntgtgtgtgnnctgaacagnntttttttttttttttttttttttttttttt

SEQ ID NO: 967 - DNA, 84 bp, synthetic construct
  source 1..84: mol_type = other DNA
tttttttaagcagtggtatcaacgcagagtacnntgtgtgtgnngtaggttcnntttttttttttttttttttttttttttttt

SEQ ID NO: 968 - DNA, 84 bp, synthetic construct
  source 1..84: mol_type = other DNA
tttttttaagcagtggtatcaacgcagagtacnntgtgtgtgnngtatggacnntttttttttttttttttttttttttttttt

SEQ ID NO: 969 - DNA, 84 bp, synthetic construct
  source 1..84: mol_type = other DNA
tttttttaagcagtggtatcaacgcagagtacnntgtgtgtgnntcgcaacanntttttttttttttttttttttttttttttt

SEQ ID NO: 970 - DNA, 84 bp, synthetic construct
  source 1..84: mol_type = other DNA
tttttttaagcagtggtatcaacgcagagtacnntgtgtgtgnnccgctaatnntttttttttttttttttttttttttttttt

SEQ ID NO: 971 - DNA, 84 bp, synthetic construct
  source 1..84: mol_type = other DNA
tttttttaagcagtggtatcaacgcagagtacnntgtgtgtgnngattcgcanntttttttttttttttttttttttttttttt

SEQ ID NO: 972 - DNA, 84 bp, synthetic construct
  source 1..84: mol_type = other DNA
tttttttaagcagtggtatcaacgcagagtacnntgtgtgtgnncgatggaanntttttttttttttttttttttttttttttt

SEQ ID NO: 973 - DNA, 84 bp, synthetic construct
  source 1..84: mol_type = other DNA
tttttttaagcagtggtatcaacgcagagtacnntgtgtgtgnnagcaagganntttttttttttttttttttttttttttttt

SEQ ID NO: 974 - DNA, 84 bp, synthetic construct
  source 1..84: mol_type = other DNA
tttttttaagcagtggtatcaacgcagagtacnntgtgtgtgnncgtagcaanntttttttttttttttttttttttttttttt

SEQ ID NO: 975 - DNA, 84 bp, synthetic construct
  source 1..84: mol_type = other DNA
tttttttaagcagtggtatcaacgcagagtacnntgtgtgtgnntggcagtanntttttttttttttttttttttttttttttt

SEQ ID NO: 976 - DNA, 84 bp, synthetic construct
  source 1..84: mol_type = other DNA
tttttttaagcagtggtatcaacgcagagtacnntgtgtgtgnncggtagttnntttttttttttttttttttttttttttttt

SEQ ID NO: 977 - DNA, 84 bp, synthetic construct
  source 1..84: mol_type = other DNA
tttttttaagcagtggtatcaacgcagagtacnntgtgtgtgnntgacttcgnntttttttttttttttttttttttttttttt

SEQ ID NO: 978 - DNA, 84 bp, synthetic construct
  source 1..84: mol_type = other DNA
tttttttaagcagtggtatcaacgcagagtacnntgtgtgtgnngagtgcaanntttttttttttttttttttttttttttttt

SEQ ID NO: 979 - DNA, 84 bp, synthetic construct
  source 1..84: mol_type = other DNA
tttttttaagcagtggtatcaacgcagagtacnntgtgtgtgnnacggtaacnntttttttttttttttttttttttttttttt

SEQ ID NO: 980 - DNA, 84 bp, synthetic construct
  source 1..84: mol_type = other DNA
tttttttaagcagtggtatcaacgcagagtacnntgtgtgtgnnaagtggtgnntttttttttttttttttttttttttttttt

SEQ ID NO: 981 - DNA, 84 bp, synthetic construct
  source 1..84: mol_type = other DNA
tttttttaagcagtggtatcaacgcagagtacnntgtgtgtgnnggagacaanntttttttttttttttttttttttttttttt

SEQ ID NO: 982 - DNA, 84 bp, synthetic construct
  source 1..84: mol_type = other DNA
tttttttaagcagtggtatcaacgcagagtacnntgtgtgtgnntcaaggacnntttttttttttttttttttttttttttttt

SEQ ID NO: 983 - DNA, 84 bp, synthetic construct
  source 1..84: mol_type = other DNA
tttttttaagcagtggtatcaacgcagagtacnntgtgtgtgnnaagagagcnntttttttttttttttttttttttttttttt

SEQ ID NO: 984 - DNA, 84 bp, synthetic construct
  source 1..84: mol_type = other DNA
tttttttaagcagtggtatcaacgcagagtacnntgtgtgtgnncgagagatnntttttttttttttttttttttttttttttt

SEQ ID NO: 985 - DNA, 84 bp, synthetic construct
  source 1..84: mol_type = other DNA
tttttttaagcagtggtatcaacgcagagtacnntgtgtgtgnnacagatggnntttttttttttttttttttttttttttttt

SEQ ID NO: 986 - DNA, 84 bp, synthetic construct
  source 1..84: mol_type = other DNA
tttttttaagcagtggtatcaacgcagagtacnntgtgtgtgnnaggagtcanntttttttttttttttttttttttttttttt

SEQ ID NO: 987 - DNA, 84 bp, synthetic construct
  source 1..84: mol_type = other DNA
tttttttaagcagtggtatcaacgcagagtacnntgtgtgtgnncgtgttacnntttttttttttttttttttttttttttttt

SEQ ID NO: 988 - DNA, 84 bp, synthetic construct
  source 1..84: mol_type = other DNA
tttttttaagcagtggtatcaacgcagagtacnntgtgtgtgnntagtgtgcnntttttttttttttttttttttttttttttt

SEQ ID NO: 989 - DNA, 84 bp, synthetic construct
  source 1..84: mol_type = other DNA
tttttttaagcagtggtatcaacgcagagtacnntgtgtgtgnnctcatgacnntttttttttttttttttttttttttttttt

SEQ ID NO: 990 - DNA, 84 bp, synthetic construct
  source 1..84: mol_type = other DNA
tttttttaagcagtggtatcaacgcagagtacnntgtgtgtgnngtatccagnntttttttttttttttttttttttttttttt

SEQ ID NO: 991 - DNA, 84 bp, synthetic construct
  source 1..84: mol_type = other DNA
tttttttaagcagtggtatcaacgcagagtacnntgtgtgtgnnacgcctatnntttttttttttttttttttttttttttttt

SEQ ID NO: 992 - DNA, 84 bp, synthetic construct
  source 1..84: mol_type = other DNA
tttttttaagcagtggtatcaacgcagagtacnntgtgtgtgnnaacgacctnntttttttttttttttttttttttttttttt

SEQ ID NO: 993 - DNA, 84 bp, synthetic construct
  source 1..84: mol_type = other DNA
tttttttaagcagtggtatcaacgcagagtacnntgtgtgtgnnatcaggctnntttttttttttttttttttttttttttttt

SEQ ID NO: 994 - DNA, 84 bp, synthetic construct
  source 1..84: mol_type = other DNA
tttttttaagcagtggtatcaacgcagagtacnntgtgtgtgnncaagttcgnntttttttttttttttttttttttttttttt

SEQ ID NO: 995 - DNA, 84 bp, synthetic construct
  source 1..84: mol_type = other DNA
tttttttaagcagtggtatcaacgcagagtacnntgtgtgtgnntagccaganntttttttttttttttttttttttttttttt

SEQ ID NO: 996 - DNA, 84 bp, synthetic construct
  source 1..84: mol_type = other DNA
tttttttaagcagtggtatcaacgcagagtacnntgtgtgtgnncaatcacgnntttttttttttttttttttttttttttttt

SEQ ID NO: 997 - DNA, 84 bp, synthetic construct
  source 1..84: mol_type = other DNA
tttttttaagcagtggtatcaacgcagagtacnntgtgtgtgnngcaacaagnntttttttttttttttttttttttttttttt

SEQ ID NO: 998 - DNA, 84 bp, synthetic construct
  source 1..84: mol_type = other DNA
tttttttaagcagtggtatcaacgcagagtacnntgtgtgtgnncacgacaanntttttttttttttttttttttttttttttt

SEQ ID NO: 999 - DNA, 84 bp, synthetic construct
  source 1..84: mol_type = other DNA
tttttttaagcagtggtatcaacgcagagtacnntgtgtgtgnntacggaganntttttttttttttttttttttttttttttt

SEQ ID NO: 1000 - DNA, 84 bp, synthetic construct
  source 1..84: mol_type = other DNA
tttttttaagcagtggtatcaacgcagagtacnntgtgtgtgnncgacaaganntttttttttttttttttttttttttttttt

SEQ ID NO: 1001 - DNA, 84 bp, synthetic construct
  source 1..84: mol_type = other DNA
tttttttaagcagtggtatcaacgcagagtacnntgtgtgtgnncgaagtganntttttttttttttttttttttttttttttt

SEQ ID NO: 1002 - DNA, 84 bp, synthetic construct
  source 1..84: mol_type = other DNA
tttttttaagcagtggtatcaacgcagagtacnntgtgtgtgnnagctggtanntttttttttttttttttttttttttttttt

SEQ ID NO: 1003 - DNA, 84 bp, synthetic construct
  source 1..84: mol_type = other DNA
tttttttaagcagtggtatcaacgcagagtacnntgtgtgtgnnaactaggcnntttttttttttttttttttttttttttttt

SEQ ID NO: 1004 - DNA, 84 bp, synthetic construct
  source 1..84: mol_type = other DNA
tttttttaagcagtggtatcaacgcagagtacnntgtgtgtgnncagcaagtnntttttttttttttttttttttttttttttt

SEQ ID NO: 1005 - DNA, 84 bp, synthetic construct
  source 1..84: mol_type = other DNA
tttttttaagcagtggtatcaacgcagagtacnntgtgtgtgnnacgaggtanntttttttttttttttttttttttttttttt

SEQ ID NO: 1006 - DNA, 84 bp, synthetic construct
  source 1..84: mol_type = other DNA
tttttttaagcagtggtatcaacgcagagtacnntgtgtgtgnncatcttccnntttttttttttttttttttttttttttttt

SEQ ID NO: 1007 - DNA, 84 bp, synthetic construct
  source 1..84: mol_type = other DNA
tttttttaagcagtggtatcaacgcagagtacnntgtgtgtgnncctgaatcnntttttttttttttttttttttttttttttt

SEQ ID NO: 1008 - DNA, 84 bp, synthetic construct
  source 1..84: mol_type = other DNA
tttttttaagcagtggtatcaacgcagagtacnntgtgtgtgnntgcagactnntttttttttttttttttttttttttttttt

SEQ ID NO: 1009 - DNA, 84 bp, synthetic construct
  source 1..84: mol_type = other DNA
tttttttaagcagtggtatcaacgcagagtacnntgtgtgtgnnagatgtggnntttttttttttttttttttttttttttttt

SEQ ID NO: 1010 - DNA, 84 bp, synthetic construct
  source 1..84: mol_type = other DNA
tttttttaagcagtggtatcaacgcagagtacnntgtgtgtgnnagttcgacnntttttttttttttttttttttttttttttt

SEQ ID NO: 1011 - DNA, 84 bp, synthetic construct
  source 1..84: mol_type = other DNA
tttttttaagcagtggtatcaacgcagagtacnntgtgtgtgnnacaacctcnntttttttttttttttttttttttttttttt

SEQ ID NO: 1012 - DNA, 84 bp, synthetic construct
  source 1..84: mol_type = other DNA
tttttttaagcagtggtatcaacgcagagtacnntgtgtgtgnncatggtagnntttttttttttttttttttttttttttttt

SEQ ID NO: 1013 - DNA, 84 bp, synthetic construct
  source 1..84: mol_type = other DNA
tttttttaagcagtggtatcaacgcagagtacnntgtgtgtgnncgtatctcnntttttttttttttttttttttttttttttt

SEQ ID NO: 1014 - DNA, 84 bp, synthetic construct
  source 1..84: mol_type = other DNA
tttttttaagcagtggtatcaacgcagagtacnntgtgtgtgnncctagttcnntttttttttttttttttttttttttttttt

SEQ ID NO: 1015 - DNA, 84 bp, synthetic construct
  source 1..84: mol_type = other DNA
tttttttaagcagtggtatcaacgcagagtacnntgtgtgtgnncaagagtcnntttttttttttttttttttttttttttttt

SEQ ID NO: 1016 - DNA, 84 bp, synthetic construct
  source 1..84: mol_type = other DNA
tttttttaagcagtggtatcaacgcagagtacnntggcctaannaatcggcanntttttttttttttttttttttttttttttt

SEQ ID NO: 1017 - DNA, 84 bp, synthetic construct
  source 1..84: mol_type = other DNA
tttttttaagcagtggtatcaacgcagagtacnntggcctaanntacggcatnntttttttttttttttttttttttttttttt

SEQ ID NO: 1018 - DNA, 84 bp, synthetic construct
  source 1..84: mol_type = other DNA
tttttttaagcagtggtatcaacgcagagtacnntggcctaannttggatcgnntttttttttttttttttttttttttttttt

SEQ ID NO: 1019 - DNA, 84 bp, synthetic construct
  source 1..84: mol_type = other DNA
tttttttaagcagtggtatcaacgcagagtacnntggcctaanntggaacganntttttttttttttttttttttttttttttt

SEQ ID NO: 1020 - DNA, 84 bp, synthetic construct
  source 1..84: mol_type = other DNA
tttttttaagcagtggtatcaacgcagagtacnntggcctaannggcaatcanntttttttttttttttttttttttttttttt

SEQ ID NO: 1021 - DNA, 84 bp, synthetic construct
  source 1..84: mol_type = other DNA
tttttttaagcagtggtatcaacgcagagtacnntggcctaanngaatccganntttttttttttttttttttttttttttttt

SEQ ID NO: 1022 - DNA, 84 bp, synthetic construct
  source 1..84: mol_type = other DNA
tttttttaagcagtggtatcaacgcagagtacnntggcctaannttacggtgnntttttttttttttttttttttttttttttt

SEQ ID NO: 1023 - DNA, 84 bp, synthetic construct
  source 1..84: mol_type = other DNA
tttttttaagcagtggtatcaacgcagagtacnntggcctaanncatatcggnntttttttttttttttttttttttttttttt

SEQ ID NO: 1024 - DNA, 84 bp, synthetic construct
  source 1..84: mol_type = other DNA
tttttttaagcagtggtatcaacgcagagtacnntggcctaanncttcggtanntttttttttttttttttttttttttttttt

SEQ ID NO: 1025 - DNA, 84 bp, synthetic construct
  source 1..84: mol_type = other DNA
tttttttaagcagtggtatcaacgcagagtacnntggcctaanntcctaacgnntttttttttttttttttttttttttttttt

SEQ ID NO: 1026 - DNA, 84 bp, synthetic construct
  source 1..84: mol_type = other DNA
tttttttaagcagtggtatcaacgcagagtacnntggcctaanngtaagccanntttttttttttttttttttttttttttttt

SEQ ID NO: 1027 - DNA, 84 bp, synthetic construct
  source 1..84: mol_type = other DNA
tttttttaagcagtggtatcaacgcagagtacnntggcctaanntaaggtggnntttttttttttttttttttttttttttttt

SEQ ID NO: 1028 - DNA, 84 bp, synthetic construct
  source 1..84: mol_type = other DNA
tttttttaagcagtggtatcaacgcagagtacnntggcctaannggtaagctnntttttttttttttttttttttttttttttt

SEQ ID NO: 1029 - DNA, 84 bp, synthetic construct
  source 1..84: mol_type = other DNA
tttttttaagcagtggtatcaacgcagagtacnntggcctaanntgtgtcganntttttttttttttttttttttttttttttt

SEQ ID NO: 1030 - DNA, 84 bp, synthetic construct
  source 1..84: mol_type = other DNA
tttttttaagcagtggtatcaacgcagagtacnntggcctaanngagcatganntttttttttttttttttttttttttttttt

SEQ ID NO: 1031 - DNA, 84 bp, synthetic construct
  source 1..84: mol_type = other DNA
tttttttaagcagtggtatcaacgcagagtacnntggcctaanntcgaagtcnntttttttttttttttttttttttttttttt

SEQ ID NO: 1032 - DNA, 84 bp, synthetic construct
  source 1..84: mol_type = other DNA
tttttttaagcagtggtatcaacgcagagtacnntggcctaannggtgaacanntttttttttttttttttttttttttttttt

SEQ ID NO: 1033 - DNA, 84 bp, synthetic construct
  source 1..84: mol_type = other DNA
tttttttaagcagtggtatcaacgcagagtacnntggcctaannacatgcacnntttttttttttttttttttttttttttttt

SEQ ID NO: 1034 - DNA, 84 bp, synthetic construct
  source 1..84: mol_type = other DNA
tttttttaagcagtggtatcaacgcagagtacnntggcctaannccaacagtnntttttttttttttttttttttttttttttt

SEQ ID NO: 1035 - DNA, 84 bp, synthetic construct
  source 1..84: mol_type = other DNA
tttttttaagcagtggtatcaacgcagagtacnntggcctaannagaacagcnntttttttttttttttttttttttttttttt

SEQ ID NO: 1036 - DNA, 84 bp, synthetic construct
  source 1..84: mol_type = other DNA
tttttttaagcagtggtatcaacgcagagtacnntggcctaanngaacacgtnntttttttttttttttttttttttttttttt

SEQ ID NO: 1037 - DNA, 84 bp, synthetic construct
  source 1..84: mol_type = other DNA
tttttttaagcagtggtatcaacgcagagtacnntggcctaannggtcttcanntttttttttttttttttttttttttttttt

SEQ ID NO: 1038 - DNA, 84 bp, synthetic construct
  source 1..84: mol_type = other DNA
tttttttaagcagtggtatcaacgcagagtacnntggcctaannaggttcagnntttttttttttttttttttttttttttttt

SEQ ID NO: 1039 - DNA, 84 bp, synthetic construct
  source 1..84: mol_type = other DNA
tttttttaagcagtggtatcaacgcagagtacnntggcctaannctagagcanntttttttttttttttttttttttttttttt

SEQ ID NO: 1040 - DNA, 84 bp, synthetic construct
  source 1..84: mol_type = other DNA
tttttttaagcagtggtatcaacgcagagtacnntggcctaanncttctagcnntttttttttttttttttttttttttttttt

SEQ ID NO: 1041 - DNA, 84 bp, synthetic construct
  source 1..84: mol_type = other DNA
tttttttaagcagtggtatcaacgcagagtacnntggcctaanngagtaacgnntttttttttttttttttttttttttttttt

SEQ ID NO: 1042 - DNA, 84 bp, synthetic construct
  source 1..84: mol_type = other DNA
tttttttaagcagtggtatcaacgcagagtacnntggcctaannctaagaggnntttttttttttttttttttttttttttttt

SEQ ID NO: 1043 - DNA, 84 bp, synthetic construct
  source 1..84: mol_type = other DNA
tttttttaagcagtggtatcaacgcagagtacnntggcctaannacgtgtagnntttttttttttttttttttttttttttttt

SEQ ID NO: 1044 - DNA, 84 bp, synthetic construct
  source 1..84: mol_type = other DNA
tttttttaagcagtggtatcaacgcagagtacnntggcctaannactacaggnntttttttttttttttttttttttttttttt

SEQ ID NO: 1045 - DNA, 84 bp, synthetic construct
  source 1..84: mol_type = other DNA
tttttttaagcagtggtatcaacgcagagtacnntggcctaanntacaggtcnntttttttttttttttttttttttttttttt

SEQ ID NO: 1046 - DNA, 84 bp, synthetic construct
  source 1..84: mol_type = other DNA
tttttttaagcagtggtatcaacgcagagtacnntggcctaannctcacatgnntttttttttttttttttttttttttttttt

SEQ ID NO: 1047 - DNA, 84 bp, synthetic construct
  source 1..84: mol_type = other DNA
tttttttaagcagtggtatcaacgcagagtacnntggcctaannactaggagnntttttttttttttttttttttttttttttt

SEQ ID NO: 1048 - DNA, 84 bp, synthetic construct
  source 1..84: mol_type = other DNA
tttttttaagcagtggtatcaacgcagagtacnntggcctaannccatagganntttttttttttttttttttttttttttttt

SEQ ID NO: 1049 - DNA, 84 bp, synthetic construct
  source 1..84: mol_type = other DNA
tttttttaagcagtggtatcaacgcagagtacnntggcctaannggagaatcnntttttttttttttttttttttttttttttt

SEQ ID NO: 1050 - DNA, 84 bp, synthetic construct
  source 1..84: mol_type = other DNA
tttttttaagcagtggtatcaacgcagagtacnntggcctaanngccaagaanntttttttttttttttttttttttttttttt

SEQ ID NO: 1051 - DNA, 84 bp, synthetic construct
  source 1..84: mol_type = other DNA
tttttttaagcagtggtatcaacgcagagtacnntggcctaannaaggcaagnntttttttttttttttttttttttttttttt

SEQ ID NO: 1052 - DNA, 84 bp, synthetic construct
  source 1..84: mol_type = other DNA
tttttttaagcagtggtatcaacgcagagtacnntggcctaannaatgtcgcnntttttttttttttttttttttttttttttt

SEQ ID NO: 1053 - DNA, 84 bp, synthetic construct
  source 1..84: mol_type = other DNA
tttttttaagcagtggtatcaacgcagagtacnntggcctaannatggaaccnntttttttttttttttttttttttttttttt

SEQ ID NO: 1054 - DNA, 84 bp, synthetic construct
  source 1..84: mol_type = other DNA
tttttttaagcagtggtatcaacgcagagtacnntggcctaannagaggcatnntttttttttttttttttttttttttttttt

SEQ ID NO: 1055 - DNA, 84 bp, synthetic construct
  source 1..84: mol_type = other DNA
tttttttaagcagtggtatcaacgcagagtacnntggcctaanntgcatagcnntttttttttttttttttttttttttttttt

SEQ ID NO: 1056 - DNA, 84 bp, synthetic construct
  source 1..84: mol_type = other DNA
tttttttaagcagtggtatcaacgcagagtacnntggcctaannctaacgganntttttttttttttttttttttttttttttt

SEQ ID NO: 1057 - DNA, 84 bp, synthetic construct
  source 1..84: mol_type = other DNA
tttttttaagcagtggtatcaacgcagagtacnntggcctaanntatcgaggnntttttttttttttttttttttttttttttt

SEQ ID NO: 1058 - DNA, 84 bp, synthetic construct
  source 1..84: mol_type = other DNA
tttttttaagcagtggtatcaacgcagagtacnntggcctaanncatagcctnntttttttttttttttttttttttttttttt

SEQ ID NO: 1059 - DNA, 84 bp, synthetic construct
  source 1..84: mol_type = other DNA
tttttttaagcagtggtatcaacgcagagtacnntggcctaannatcgagacnntttttttttttttttttttttttttttttt

SEQ ID NO: 1060 - DNA, 84 bp, synthetic construct
  source 1..84: mol_type = other DNA
tttttttaagcagtggtatcaacgcagagtacnntggcctaannggaagagtnntttttttttttttttttttttttttttttt

SEQ ID NO: 1061 - DNA, 84 bp, synthetic construct
  source 1..84: mol_type = other DNA
tttttttaagcagtggtatcaacgcagagtacnntggcctaannccaagtagnntttttttttttttttttttttttttttttt

SEQ ID NO: 1062 - DNA, 84 bp, synthetic construct
  source 1..84: mol_type = other DNA
tttttttaagcagtggtatcaacgcagagtacnntggcctaannctgaacagnntttttttttttttttttttttttttttttt

SEQ ID NO: 1063 - DNA, 84 bp, synthetic construct
  source 1..84: mol_type = other DNA
tttttttaagcagtggtatcaacgcagagtacnntggcctaanngtaggttcnntttttttttttttttttttttttttttttt

SEQ ID NO: 1064 - DNA, 84 bp, synthetic construct
  source 1..84: mol_type = other DNA
tttttttaagcagtggtatcaacgcagagtacnntggcctaanngtatggacnntttttttttttttttttttttttttttttt

SEQ ID NO: 1065 - DNA, 84 bp, synthetic construct
  source 1..84: mol_type = other DNA
tttttttaagcagtggtatcaacgcagagtacnntggcctaanntcgcaacanntttttttttttttttttttttttttttttt

SEQ ID NO: 1066 - DNA, 84 bp, synthetic construct
  source 1..84: mol_type = other DNA
tttttttaagcagtggtatcaacgcagagtacnntggcctaannccgctaatnntttttttttttttttttttttttttttttt

SEQ ID NO: 1067 - DNA, 84 bp, synthetic construct
  source 1..84: mol_type = other DNA
tttttttaagcagtggtatcaacgcagagtacnntggcctaanngattcgcanntttttttttttttttttttttttttttttt

SEQ ID NO: 1068 - DNA, 84 bp, synthetic construct
  source 1..84: mol_type = other DNA
tttttttaagcagtggtatcaacgcagagtacnntggcctaanncgatggaanntttttttttttttttttttttttttttttt

SEQ ID NO: 1069 - DNA, 84 bp, synthetic construct
  source 1..84: mol_type = other DNA
tttttttaagcagtggtatcaacgcagagtacnntggcctaannagcaagganntttttttttttttttttttttttttttttt

SEQ ID NO: 1070 - DNA, 84 bp, synthetic construct
  source 1..84: mol_type = other DNA
tttttttaagcagtggtatcaacgcagagtacnntggcctaanncgtagcaanntttttttttttttttttttttttttttttt

SEQ ID NO: 1071 - DNA, 84 bp, synthetic construct
  source 1..84: mol_type = other DNA
tttttttaagcagtggtatcaacgcagagtacnntggcctaanntggcagtanntttttttttttttttttttttttttttttt

SEQ ID NO: 1072 - DNA, 84 bp, synthetic construct
  source 1..84: mol_type = other DNA
tttttttaagcagtggtatcaacgcagagtacnntggcctaanncggtagttnntttttttttttttttttttttttttttttt

SEQ ID NO: 1073 - DNA, 84 bp, synthetic construct
  source 1..84: mol_type = other DNA
tttttttaagcagtggtatcaacgcagagtacnntggcctaanntgacttcgnntttttttttttttttttttttttttttttt

SEQ ID NO: 1074 - DNA, 84 bp, synthetic construct
  source 1..84: mol_type = other DNA
tttttttaagcagtggtatcaacgcagagtacnntggcctaanngagtgcaanntttttttttttttttttttttttttttttt

SEQ ID NO: 1075 - DNA, 84 bp, synthetic construct
  source 1..84: mol_type = other DNA
tttttttaagcagtggtatcaacgcagagtacnntggcctaannacggtaacnntttttttttttttttttttttttttttttt

SEQ ID NO: 1076 - DNA, 84 bp, synthetic construct
  source 1..84: mol_type = other DNA
tttttttaagcagtggtatcaacgcagagtacnntggcctaannaagtggtgnntttttttttttttttttttttttttttttt

SEQ ID NO: 1077 - DNA, 84 bp, synthetic construct
  source 1..84: mol_type = other DNA
tttttttaagcagtggtatcaacgcagagtacnntggcctaannggagacaanntttttttttttttttttttttttttttttt

SEQ ID NO: 1078 - DNA, 84 bp, synthetic construct
  source 1..84: mol_type = other DNA
tttttttaagcagtggtatcaacgcagagtacnntggcctaanntcaaggacnntttttttttttttttttttttttttttttt

SEQ ID NO: 1079 - DNA, 84 bp, synthetic construct
  source 1..84: mol_type = other DNA
tttttttaagcagtggtatcaacgcagagtacnntggcctaannaagagagcnntttttttttttttttttttttttttttttt

SEQ ID NO: 1080 - DNA, 84 bp, synthetic construct
  source 1..84: mol_type = other DNA
tttttttaagcagtggtatcaacgcagagtacnntggcctaanncgagagatnntttttttttttttttttttttttttttttt

SEQ ID NO: 1081 - DNA, 84 bp, synthetic construct
  source 1..84: mol_type = other DNA
tttttttaagcagtggtatcaacgcagagtacnntggcctaannacagatggnntttttttttttttttttttttttttttttt

SEQ ID NO: 1082 - DNA, 84 bp, synthetic construct
  source 1..84: mol_type = other DNA
tttttttaagcagtggtatcaacgcagagtacnntggcctaannaggagtcanntttttttttttttttttttttttttttttt

SEQ ID NO: 1083 - DNA, 84 bp, synthetic construct
  source 1..84: mol_type = other DNA
tttttttaagcagtggtatcaacgcagagtacnntggcctaanncgtgttacnntttttttttttttttttttttttttttttt

SEQ ID NO: 1084 - DNA, 84 bp, synthetic construct
  source 1..84: mol_type = other DNA
tttttttaagcagtggtatcaacgcagagtacnntggcctaanntagtgtgcnntttttttttttttttttttttttttttttt

SEQ ID NO: 1085 - DNA, 84 bp, synthetic construct
  source 1..84: mol_type = other DNA
tttttttaagcagtggtatcaacgcagagtacnntggcctaannctcatgacnntttttttttttttttttttttttttttttt

SEQ ID NO: 1086 - DNA, 84 bp, synthetic construct
  source 1..84: mol_type = other DNA
tttttttaagcagtggtatcaacgcagagtacnntggcctaanngtatccagnntttttttttttttttttttttttttttttt

SEQ ID NO: 1087 - DNA, 84 bp, synthetic construct
  source 1..84: mol_type = other DNA
tttttttaagcagtggtatcaacgcagagtacnntggcctaannacgcctatnntttttttttttttttttttttttttttttt

SEQ ID NO: 1088 - DNA, 84 bp, synthetic construct
  source 1..84: mol_type = other DNA
tttttttaagcagtggtatcaacgcagagtacnntggcctaannaacgacctnntttttttttttttttttttttttttttttt

SEQ ID NO: 1089 - DNA, 84 bp, synthetic construct
  source 1..84: mol_type = other DNA
tttttttaagcagtggtatcaacgcagagtacnntggcctaannatcaggctnntttttttttttttttttttttttttttttt

SEQ ID NO: 1090 - DNA, 84 bp, synthetic construct
  source 1..84: mol_type = other DNA
tttttttaagcagtggtatcaacgcagagtacnntggcctaanncaagttcgnntttttttttttttttttttttttttttttt

SEQ ID NO: 1091 - DNA, 84 bp, synthetic construct
  source 1..84: mol_type = other DNA
tttttttaagcagtggtatcaacgcagagtacnntggcctaanntagccaganntttttttttttttttttttttttttttttt

SEQ ID NO: 1092 - DNA, 84 bp, synthetic construct
  source 1..84: mol_type = other DNA
tttttttaagcagtggtatcaacgcagagtacnntggcctaanncaatcacgnntttttttttttttttttttttttttttttt

SEQ ID NO: 1093 - DNA, 84 bp, synthetic construct
  source 1..84: mol_type = other DNA
tttttttaagcagtggtatcaacgcagagtacnntggcctaanngcaacaagnntttttttttttttttttttttttttttttt

SEQ ID NO: 1094 - DNA, 84 bp, synthetic construct
  source 1..84: mol_type = other DNA
tttttttaagcagtggtatcaacgcagagtacnntggcctaanncacgacaanntttttttttttttttttttttttttttttt

SEQ ID NO: 1095 - DNA, 84 bp, synthetic construct
  source 1..84: mol_type = other DNA
tttttttaagcagtggtatcaacgcagagtacnntggcctaanntacggaganntttttttttttttttttttttttttttttt

SEQ ID NO: 1096 - DNA, 84 bp, synthetic construct
  source 1..84: mol_type = other DNA
tttttttaagcagtggtatcaacgcagagtacnntggcctaanncgacaaganntttttttttttttttttttttttttttttt

SEQ ID NO: 1097 - DNA, 84 bp, synthetic construct
  source 1..84: mol_type = other DNA
tttttttaagcagtggtatcaacgcagagtacnntggcctaanncgaagtganntttttttttttttttttttttttttttttt

SEQ ID NO: 1098 - DNA, 84 bp, synthetic construct
  source 1..84: mol_type = other DNA
tttttttaagcagtggtatcaacgcagagtacnntggcctaannagctggtanntttttttttttttttttttttttttttttt

SEQ ID NO: 1099 - DNA, 84 bp, synthetic construct
  source 1..84: mol_type = other DNA
tttttttaagcagtggtatcaacgcagagtacnntggcctaannaactaggcnntttttttttttttttttttttttttttttt

SEQ ID NO: 1100 - DNA, 84 bp, synthetic construct
  source 1..84: mol_type = other DNA
tttttttaagcagtggtatcaacgcagagtacnntggcctaanncagcaagtnntttttttttttttttttttttttttttttt

SEQ ID NO: 1101 - DNA, 84 bp, synthetic construct
  source 1..84: mol_type = other DNA
tttttttaagcagtggtatcaacgcagagtacnntggcctaannacgaggtanntttttttttttttttttttttttttttttt

SEQ ID NO: 1102 - DNA, 84 bp, synthetic construct
  source 1..84: mol_type = other DNA
tttttttaagcagtggtatcaacgcagagtacnntggcctaanncatcttccnntttttttttttttttttttttttttttttt

SEQ ID NO: 1103 - DNA, 84 bp, synthetic construct
  source 1..84: mol_type = other DNA
tttttttaagcagtggtatcaacgcagagtacnntggcctaanncctgaatcnntttttttttttttttttttttttttttttt

SEQ ID NO: 1104 - DNA, 84 bp, synthetic construct
  source 1..84: mol_type = other DNA
tttttttaagcagtggtatcaacgcagagtacnntggcctaanntgcagactnntttttttttttttttttttttttttttttt

SEQ ID NO: 1105 - DNA, 84 bp, synthetic construct
  source 1..84: mol_type = other DNA
tttttttaagcagtggtatcaacgcagagtacnntggcctaannagatgtggnntttttttttttttttttttttttttttttt

SEQ ID NO: 1106 - DNA, 84 bp, synthetic construct
  source 1..84: mol_type = other DNA
tttttttaagcagtggtatcaacgcagagtacnntggcctaannagttcgacnntttttttttttttttttttttttttttttt

SEQ ID NO: 1107 - DNA, 84 bp, synthetic construct
  source 1..84: mol_type = other DNA
tttttttaagcagtggtatcaacgcagagtacnntggcctaannacaacctcnntttttttttttttttttttttttttttttt

SEQ ID NO: 1108 - DNA, 84 bp, synthetic construct
  source 1..84: mol_type = other DNA
tttttttaagcagtggtatcaacgcagagtacnntggcctaanncatggtagnntttttttttttttttttttttttttttttt

SEQ ID NO: 1109 - DNA, 84 bp, synthetic construct
  source 1..84: mol_type = other DNA
tttttttaagcagtggtatcaacgcagagtacnntggcctaanncgtatctcnntttttttttttttttttttttttttttttt

SEQ ID NO: 1110 - DNA, 84 bp, synthetic construct
  source 1..84: mol_type = other DNA
tttttttaagcagtggtatcaacgcagagtacnntggcctaanncctagttcnntttttttttttttttttttttttttttttt

SEQ ID NO: 1111 - DNA, 84 bp, synthetic construct
  source 1..84: mol_type = other DNA
tttttttaagcagtggtatcaacgcagagtacnntggcctaanncaagagtcnntttttttttttttttttttttttttttttt

SEQ ID NO: 1112 - DNA, 84 bp, synthetic construct
  source 1..84: mol_type = other DNA
tttttttaagcagtggtatcaacgcagagtacnntcggacaannaatcggcanntttttttttttttttttttttttttttttt

SEQ ID NO: 1113 - DNA, 84 bp, synthetic construct
  source 1..84: mol_type = other DNA
tttttttaagcagtggtatcaacgcagagtacnntcggacaanntacggcatnntttttttttttttttttttttttttttttt

SEQ ID NO: 1114 - DNA, 84 bp, synthetic construct
  source 1..84: mol_type = other DNA
tttttttaagcagtggtatcaacgcagagtacnntcggacaannttggatcgnntttttttttttttttttttttttttttttt

SEQ ID NO: 1115 - DNA, 84 bp, synthetic construct
  source 1..84: mol_type = other DNA
tttttttaagcagtggtatcaacgcagagtacnntcggacaanntggaacganntttttttttttttttttttttttttttttt

SEQ ID NO: 1116 - DNA, 84 bp, synthetic construct
  source 1..84: mol_type = other DNA
tttttttaagcagtggtatcaacgcagagtacnntcggacaannggcaatcanntttttttttttttttttttttttttttttt

SEQ ID NO: 1117 - DNA, 84 bp, synthetic construct
  source 1..84: mol_type = other DNA
tttttttaagcagtggtatcaacgcagagtacnntcggacaanngaatccganntttttttttttttttttttttttttttttt

SEQ ID NO: 1118 - DNA, 84 bp, synthetic construct
  source 1..84: mol_type = other DNA
tttttttaagcagtggtatcaacgcagagtacnntcggacaannttacggtgnntttttttttttttttttttttttttttttt

SEQ ID NO: 1119 - DNA, 84 bp, synthetic construct
  source 1..84: mol_type = other DNA
tttttttaagcagtggtatcaacgcagagtacnntcggacaanncatatcggnntttttttttttttttttttttttttttttt

SEQ ID NO: 1120 - DNA, 84 bp, synthetic construct
  source 1..84: mol_type = other DNA
tttttttaagcagtggtatcaacgcagagtacnntcggacaanncttcggtanntttttttttttttttttttttttttttttt

SEQ ID NO: 1121 - DNA, 84 bp, synthetic construct
  source 1..84: mol_type = other DNA
tttttttaagcagtggtatcaacgcagagtacnntcggacaanntcctaacgnntttttttttttttttttttttttttttttt

SEQ ID NO: 1122 - DNA, 84 bp, synthetic construct
  source 1..84: mol_type = other DNA
tttttttaagcagtggtatcaacgcagagtacnntcggacaanngtaagccanntttttttttttttttttttttttttttttt

SEQ ID NO: 1123 - DNA, 84 bp, synthetic construct
  source 1..84: mol_type = other DNA
tttttttaagcagtggtatcaacgcagagtacnntcggacaanntaaggtggnntttttttttttttttttttttttttttttt

SEQ ID NO: 1124 - DNA, 84 bp, synthetic construct
  source 1..84: mol_type = other DNA
tttttttaagcagtggtatcaacgcagagtacnntcggacaannggtaagctnntttttttttttttttttttttttttttttt

SEQ ID NO: 1125 - DNA, 84 bp, synthetic construct
  source 1..84: mol_type = other DNA
tttttttaagcagtggtatcaacgcagagtacnntcggacaanntgtgtcganntttttttttttttttttttttttttttttt

SEQ ID NO: 1126 - DNA, 84 bp, synthetic construct
  source 1..84: mol_type = other DNA
tttttttaagcagtggtatcaacgcagagtacnntcggacaanngagcatganntttttttttttttttttttttttttttttt

SEQ ID NO: 1127 - DNA, 84 bp, synthetic construct
  source 1..84: mol_type = other DNA
tttttttaagcagtggtatcaacgcagagtacnntcggacaanntcgaagtcnntttttttttttttttttttttttttttttt

SEQ ID NO: 1128 - DNA, 84 bp, synthetic construct
  source 1..84: mol_type = other DNA
tttttttaagcagtggtatcaacgcagagtacnntcggacaannggtgaacanntttttttttttttttttttttttttttttt

SEQ ID NO: 1129 - DNA, 84 bp, synthetic construct
  source 1..84: mol_type = other DNA
tttttttaagcagtggtatcaacgcagagtacnntcggacaannacatgcacnntttttttttttttttttttttttttttttt

SEQ ID NO: 1130 - DNA, 84 bp, synthetic construct
  source 1..84: mol_type = other DNA
tttttttaagcagtggtatcaacgcagagtacnntcggacaannccaacagtnntttttttttttttttttttttttttttttt

SEQ ID NO: 1131 - DNA, 84 bp, synthetic construct
  source 1..84: mol_type = other DNA
tttttttaagcagtggtatcaacgcagagtacnntcggacaannagaacagcnntttttttttttttttttttttttttttttt

SEQ ID NO: 1132 - DNA, 84 bp, synthetic construct
  source 1..84: mol_type = other DNA
tttttttaagcagtggtatcaacgcagagtacnntcggacaanngaacacgtnntttttttttttttttttttttttttttttt

SEQ ID NO: 1133 - DNA, 84 bp, synthetic construct
  source 1..84: mol_type = other DNA
tttttttaagcagtggtatcaacgcagagtacnntcggacaannggtcttcanntttttttttttttttttttttttttttttt

SEQ ID NO: 1134 - DNA, 84 bp, synthetic construct
  source 1..84: mol_type = other DNA
tttttttaagcagtggtatcaacgcagagtacnntcggacaannaggttcagnntttttttttttttttttttttttttttttt

SEQ ID NO: 1135 - DNA, 84 bp, synthetic construct
  source 1..84: mol_type = other DNA
tttttttaagcagtggtatcaacgcagagtacnntcggacaannctagagcanntttttttttttttttttttttttttttttt

SEQ ID NO: 1136 - DNA, 84 bp, synthetic construct
  source 1..84: mol_type = other DNA
tttttttaagcagtggtatcaacgcagagtacnntcggacaanncttctagcnntttttttttttttttttttttttttttttt

SEQ ID NO: 1137 - DNA, 84 bp, synthetic construct
  source 1..84: mol_type = other DNA
tttttttaagcagtggtatcaacgcagagtacnntcggacaanngagtaacgnntttttttttttttttttttttttttttttt

SEQ ID NO: 1138 - DNA, 84 bp, synthetic construct
  source 1..84: mol_type = other DNA
tttttttaagcagtggtatcaacgcagagtacnntcggacaannctaagaggnntttttttttttttttttttttttttttttt

SEQ ID NO: 1139 - DNA, 84 bp, synthetic construct
  source 1..84: mol_type = other DNA
tttttttaagcagtggtatcaacgcagagtacnntcggacaannacgtgtagnntttttttttttttttttttttttttttttt

SEQ ID NO: 1140 - DNA, 84 bp, synthetic construct
  source 1..84: mol_type = other DNA
tttttttaagcagtggtatcaacgcagagtacnntcggacaannactacaggnntttttttttttttttttttttttttttttt

SEQ ID NO: 1141 - DNA, 84 bp, synthetic construct
  source 1..84: mol_type = other DNA
tttttttaagcagtggtatcaacgcagagtacnntcggacaanntacaggtcnntttttttttttttttttttttttttttttt

SEQ ID NO: 1142 - DNA, 84 bp, synthetic construct
  source 1..84: mol_type = other DNA
tttttttaagcagtggtatcaacgcagagtacnntcggacaannctcacatgnntttttttttttttttttttttttttttttt

SEQ ID NO: 1143 - DNA, 84 bp, synthetic construct
  source 1..84: mol_type = other DNA
tttttttaagcagtggtatcaacgcagagtacnntcggacaannactaggagnntttttttttttttttttttttttttttttt

SEQ ID NO: 1144 - DNA, 84 bp, synthetic construct
  source 1..84: mol_type = other DNA
tttttttaagcagtggtatcaacgcagagtacnntcggacaannccatagganntttttttttttttttttttttttttttttt

SEQ ID NO: 1145 - DNA, 84 bp, synthetic construct
  source 1..84: mol_type = other DNA
tttttttaagcagtggtatcaacgcagagtacnntcggacaannggagaatcnntttttttttttttttttttttttttttttt

SEQ ID NO: 1146 - DNA, 84 bp, synthetic construct
  source 1..84: mol_type = other DNA
tttttttaagcagtggtatcaacgcagagtacnntcggacaanngccaagaanntttttttttttttttttttttttttttttt

SEQ ID NO: 1147 - DNA, 84 bp, synthetic construct
  source 1..84: mol_type = other DNA
tttttttaagcagtggtatcaacgcagagtacnntcggacaannaaggcaagnntttttttttttttttttttttttttttttt

SEQ ID NO: 1148 - DNA, 84 bp, synthetic construct
  source 1..84: mol_type = other DNA
tttttttaagcagtggtatcaacgcagagtacnntcggacaannaatgtcgcnntttttttttttttttttttttttttttttt

SEQ ID NO: 1149 - DNA, 84 bp, synthetic construct
  source 1..84: mol_type = other DNA
tttttttaagcagtggtatcaacgcagagtacnntcggacaannatggaaccnntttttttttttttttttttttttttttttt

SEQ ID NO: 1150 - DNA, 84 bp, synthetic construct
  source 1..84: mol_type = other DNA
tttttttaagcagtggtatcaacgcagagtacnntcggacaannagaggcatnntttttttttttttttttttttttttttttt

SEQ ID NO: 1151 - DNA, 84 bp, synthetic construct
  source 1..84: mol_type = other DNA
tttttttaagcagtggtatcaacgcagagtacnntcggacaanntgcatagcnntttttttttttttttttttttttttttttt

SEQ ID NO: 1152 - DNA, 84 bp, synthetic construct
  source 1..84: mol_type = other DNA
tttttttaagcagtggtatcaacgcagagtacnntcggacaannctaacgganntttttttttttttttttttttttttttttt

SEQ ID NO: 1153 - DNA, 84 bp, synthetic construct
  source 1..84: mol_type = other DNA
tttttttaagcagtggtatcaacgcagagtacnntcggacaanntatcgaggnntttttttttttttttttttttttttttttt

SEQ ID NO: 1154 - DNA, 84 bp, synthetic construct
  source 1..84: mol_type = other DNA
tttttttaagcagtggtatcaacgcagagtacnntcggacaanncatagcctnntttttttttttttttttttttttttttttt

SEQ ID NO: 1155 - DNA, 84 bp, synthetic construct
  source 1..84: mol_type = other DNA
tttttttaagcagtggtatcaacgcagagtacnntcggacaannatcgagacnntttttttttttttttttttttttttttttt

SEQ ID NO: 1156 - DNA, 84 bp, synthetic construct
  source 1..84: mol_type = other DNA
tttttttaagcagtggtatcaacgcagagtacnntcggacaannggaagagtnntttttttttttttttttttttttttttttt

SEQ ID NO: 1157 - DNA, 84 bp, synthetic construct
  source 1..84: mol_type = other DNA
tttttttaagcagtggtatcaacgcagagtacnntcggacaannccaagtagnntttttttttttttttttttttttttttttt

SEQ ID NO: 1158 - DNA, 84 bp, synthetic construct
  source 1..84: mol_type = other DNA
tttttttaagcagtggtatcaacgcagagtacnntcggacaannctgaacagnntttttttttttttttttttttttttttttt

SEQ ID NO: 1159 - DNA, 84 bp, synthetic construct
  source 1..84: mol_type = other DNA
tttttttaagcagtggtatcaacgcagagtacnntcggacaanngtaggttcnntttttttttttttttttttttttttttttt

SEQ ID NO: 1160 - DNA, 84 bp, synthetic construct
  source 1..84: mol_type = other DNA
tttttttaagcagtggtatcaacgcagagtacnntcggacaanngtatggacnntttttttttttttttttttttttttttttt

SEQ ID NO: 1161 - DNA, 84 bp, synthetic construct
  source 1..84: mol_type = other DNA
tttttttaagcagtggtatcaacgcagagtacnntcggacaanntcgcaacanntttttttttttttttttttttttttttttt

SEQ ID NO: 1162 - DNA, 84 bp, synthetic construct
  source 1..84: mol_type = other DNA
tttttttaagcagtggtatcaacgcagagtacnntcggacaannccgctaatnntttttttttttttttttttttttttttttt

SEQ ID NO: 1163 - DNA, 84 bp, synthetic construct
  source 1..84: mol_type = other DNA
tttttttaagcagtggtatcaacgcagagtacnntcggacaanngattcgcanntttttttttttttttttttttttttttttt

SEQ ID NO: 1164 - DNA, 84 bp, synthetic construct
  source 1..84: mol_type = other DNA
tttttttaagcagtggtatcaacgcagagtacnntcggacaanncgatggaanntttttttttttttttttttttttttttttt

SEQ ID NO: 1165 - DNA, 84 bp, synthetic construct
  source 1..84: mol_type = other DNA
tttttttaagcagtggtatcaacgcagagtacnntcggacaannagcaagganntttttttttttttttttttttttttttttt

SEQ ID NO: 1166 - DNA, 84 bp, synthetic construct
  source 1..84: mol_type = other DNA
tttttttaagcagtggtatcaacgcagagtacnntcggacaanncgtagcaanntttttttttttttttttttttttttttttt

SEQ ID NO: 1167 - DNA, 84 bp, synthetic construct
  source 1..84: mol_type = other DNA
tttttttaagcagtggtatcaacgcagagtacnntcggacaanntggcagtanntttttttttttttttttttttttttttttt

SEQ ID NO: 1168 - DNA, 84 bp, synthetic construct
  source 1..84: mol_type = other DNA
tttttttaagcagtggtatcaacgcagagtacnntcggacaanncggtagttnntttttttttttttttttttttttttttttt

SEQ ID NO: 1169 - DNA, 84 bp, synthetic construct
  source 1..84: mol_type = other DNA
tttttttaagcagtggtatcaacgcagagtacnntcggacaanntgacttcgnntttttttttttttttttttttttttttttt

SEQ ID NO: 1170 - DNA, 84 bp, synthetic construct
  source 1..84: mol_type = other DNA
tttttttaagcagtggtatcaacgcagagtacnntcggacaanngagtgcaanntttttttttttttttttttttttttttttt

SEQ ID NO: 1171 - DNA, 84 bp, synthetic construct
  source 1..84: mol_type = other DNA
tttttttaagcagtggtatcaacgcagagtacnntcggacaannacggtaacnntttttttttttttttttttttttttttttt

SEQ ID NO: 1172 - DNA, 84 bp, synthetic construct
  source 1..84: mol_type = other DNA
tttttttaagcagtggtatcaacgcagagtacnntcggacaannaagtggtgnntttttttttttttttttttttttttttttt

SEQ ID NO: 1173 - DNA, 84 bp, synthetic construct
  source 1..84: mol_type = other DNA
tttttttaagcagtggtatcaacgcagagtacnntcggacaannggagacaanntttttttttttttttttttttttttttttt

SEQ ID NO: 1174 - DNA, 84 bp, synthetic construct
  source 1..84: mol_type = other DNA
tttttttaagcagtggtatcaacgcagagtacnntcggacaanntcaaggacnntttttttttttttttttttttttttttttt

SEQ ID NO: 1175 - DNA, 84 bp, synthetic construct
  source 1..84: mol_type = other DNA
tttttttaagcagtggtatcaacgcagagtacnntcggacaannaagagagcnntttttttttttttttttttttttttttttt

SEQ ID NO: 1176 - DNA, 84 bp, synthetic construct
  source 1..84: mol_type = other DNA
tttttttaagcagtggtatcaacgcagagtacnntcggacaanncgagagatnntttttttttttttttttttttttttttttt

SEQ ID NO: 1177 - DNA, 84 bp, synthetic construct
  source 1..84: mol_type = other DNA
tttttttaagcagtggtatcaacgcagagtacnntcggacaannacagatggnntttttttttttttttttttttttttttttt

SEQ ID NO: 1178 - DNA, 84 bp, synthetic construct
  source 1..84: mol_type = other DNA
tttttttaagcagtggtatcaacgcagagtacnntcggacaannaggagtcanntttttttttttttttttttttttttttttt

SEQ ID NO: 1179 - DNA, 84 bp, synthetic construct
  source 1..84: mol_type = other DNA
tttttttaagcagtggtatcaacgcagagtacnntcggacaanncgtgttacnntttttttttttttttttttttttttttttt

SEQ ID NO: 1180 - DNA, 84 bp, synthetic construct
  source 1..84: mol_type = other DNA
tttttttaagcagtggtatcaacgcagagtacnntcggacaanntagtgtgcnntttttttttttttttttttttttttttttt

SEQ ID NO: 1181 - DNA, 84 bp, synthetic construct
  source 1..84: mol_type = other DNA
tttttttaagcagtggtatcaacgcagagtacnntcggacaannctcatgacnntttttttttttttttttttttttttttttt

SEQ ID NO: 1182 - DNA, 84 bp, synthetic construct
  source 1..84: mol_type = other DNA
tttttttaagcagtggtatcaacgcagagtacnntcggacaanngtatccagnntttttttttttttttttttttttttttttt

SEQ ID NO: 1183 - DNA, 84 bp, synthetic construct
  source 1..84: mol_type = other DNA
tttttttaagcagtggtatcaacgcagagtacnntcggacaannacgcctatnntttttttttttttttttttttttttttttt

SEQ ID NO: 1184 - DNA, 84 bp, synthetic construct
  source 1..84: mol_type = other DNA
tttttttaagcagtggtatcaacgcagagtacnntcggacaannaacgacctnntttttttttttttttttttttttttttttt

SEQ ID NO: 1185 - DNA, 84 bp, synthetic construct
  source 1..84: mol_type = other DNA
tttttttaagcagtggtatcaacgcagagtacnntcggacaannatcaggctnntttttttttttttttttttttttttttttt

SEQ ID NO: 1186 - DNA, 84 bp, synthetic construct
  source 1..84: mol_type = other DNA
tttttttaagcagtggtatcaacgcagagtacnntcggacaanncaagttcgnntttttttttttttttttttttttttttttt

SEQ ID NO: 1187 - DNA, 84 bp, synthetic construct
  source 1..84: mol_type = other DNA
tttttttaagcagtggtatcaacgcagagtacnntcggacaanntagccaganntttttttttttttttttttttttttttttt

SEQ ID NO: 1188 - DNA, 84 bp, synthetic construct
  source 1..84: mol_type = other DNA
tttttttaagcagtggtatcaacgcagagtacnntcggacaanncaatcacgnntttttttttttttttttttttttttttttt

SEQ ID NO: 1189 - DNA, 84 bp, synthetic construct
  source 1..84: mol_type = other DNA
tttttttaagcagtggtatcaacgcagagtacnntcggacaanngcaacaagnntttttttttttttttttttttttttttttt

SEQ ID NO: 1190 - DNA, 84 bp, synthetic construct
  source 1..84: mol_type = other DNA
tttttttaagcagtggtatcaacgcagagtacnntcggacaanncacgacaanntttttttttttttttttttttttttttttt

SEQ ID NO: 1191 - DNA, 84 bp, synthetic construct
  source 1..84: mol_type = other DNA
tttttttaagcagtggtatcaacgcagagtacnntcggacaanntacggaganntttttttttttttttttttttttttttttt

SEQ ID NO: 1192 - DNA, 84 bp, synthetic construct
  source 1..84: mol_type = other DNA
tttttttaagcagtggtatcaacgcagagtacnntcggacaanncgacaaganntttttttttttttttttttttttttttttt

SEQ ID NO: 1193 - DNA, 84 bp, synthetic construct
  source 1..84: mol_type = other DNA
tttttttaagcagtggtatcaacgcagagtacnntcggacaanncgaagtganntttttttttttttttttttttttttttttt

SEQ ID NO: 1194 - DNA, 84 bp, synthetic construct
  source 1..84: mol_type = other DNA
tttttttaagcagtggtatcaacgcagagtacnntcggacaannagctggtanntttttttttttttttttttttttttttttt

SEQ ID NO: 1195 - DNA, 84 bp, synthetic construct
  source 1..84: mol_type = other DNA
tttttttaagcagtggtatcaacgcagagtacnntcggacaannaactaggcnntttttttttttttttttttttttttttttt

SEQ ID NO: 1196 - DNA, 84 bp, synthetic construct
  source 1..84: mol_type = other DNA
tttttttaagcagtggtatcaacgcagagtacnntcggacaanncagcaagtnntttttttttttttttttttttttttttttt

SEQ ID NO: 1197 - DNA, 84 bp, synthetic construct
  source 1..84: mol_type = other DNA
tttttttaagcagtggtatcaacgcagagtacnntcggacaannacgaggtanntttttttttttttttttttttttttttttt

SEQ ID NO: 1198 - DNA, 84 bp, synthetic construct
  source 1..84: mol_type = other DNA
tttttttaagcagtggtatcaacgcagagtacnntcggacaanncatcttccnntttttttttttttttttttttttttttttt

SEQ ID NO: 1199 - DNA, 84 bp, synthetic construct
  source 1..84: mol_type = other DNA
tttttttaagcagtggtatcaacgcagagtacnntcggacaanncctgaatcnntttttttttttttttttttttttttttttt

SEQ ID NO: 1200 - DNA, 84 bp, synthetic construct
  source 1..84: mol_type = other DNA
tttttttaagcagtggtatcaacgcagagtacnntcggacaanntgcagactnntttttttttttttttttttttttttttttt

SEQ ID NO: 1201 - DNA, 84 bp, synthetic construct
  source 1..84: mol_type = other DNA
tttttttaagcagtggtatcaacgcagagtacnntcggacaannagatgtggnntttttttttttttttttttttttttttttt

SEQ ID NO: 1202 - DNA, 84 bp, synthetic construct
  source 1..84: mol_type = other DNA
tttttttaagcagtggtatcaacgcagagtacnntcggacaannagttcgacnntttttttttttttttttttttttttttttt

SEQ ID NO: 1203 - DNA, 84 bp, synthetic construct
  source 1..84: mol_type = other DNA
tttttttaagcagtggtatcaacgcagagtacnntcggacaannacaacctcnntttttttttttttttttttttttttttttt

SEQ ID NO: 1204 - DNA, 84 bp, synthetic construct
  source 1..84: mol_type = other DNA
tttttttaagcagtggtatcaacgcagagtacnntcggacaanncatggtagnntttttttttttttttttttttttttttttt

SEQ ID NO: 1205 - DNA, 84 bp, synthetic construct
  source 1..84: mol_type = other DNA
tttttttaagcagtggtatcaacgcagagtacnntcggacaanncgtatctcnntttttttttttttttttttttttttttttt

SEQ ID NO: 1206 - DNA, 84 bp, synthetic construct
  source 1..84: mol_type = other DNA
tttttttaagcagtggtatcaacgcagagtacnntcggacaanncctagttcnntttttttttttttttttttttttttttttt

SEQ ID NO: 1207 - DNA, 84 bp, synthetic construct
  source 1..84: mol_type = other DNA
tttttttaagcagtggtatcaacgcagagtacnntcggacaanncaagagtcnntttttttttttttttttttttttttttttt

SEQ ID NO: 1208 - DNA, 84 bp, synthetic construct
  source 1..84: mol_type = other DNA
tttttttaagcagtggtatcaacgcagagtacnnattgtccgnnaatcggcanntttttttttttttttttttttttttttttt

SEQ ID NO: 1209 - DNA, 84 bp, synthetic construct
  source 1..84: mol_type = other DNA
tttttttaagcagtggtatcaacgcagagtacnnattgtccgnntacggcatnntttttttttttttttttttttttttttttt

SEQ ID NO: 1210 - DNA, 84 bp, synthetic construct
  source 1..84: mol_type = other DNA
tttttttaagcagtggtatcaacgcagagtacnnattgtccgnnttggatcgnntttttttttttttttttttttttttttttt

SEQ ID NO: 1211 - DNA, 84 bp, synthetic construct
  source 1..84: mol_type = other DNA
tttttttaagcagtggtatcaacgcagagtacnnattgtccgnntggaacganntttttttttttttttttttttttttttttt

SEQ ID NO: 1212 - DNA, 84 bp, synthetic construct
  source 1..84: mol_type = other DNA
tttttttaagcagtggtatcaacgcagagtacnnattgtccgnnggcaatcanntttttttttttttttttttttttttttttt

SEQ ID NO: 1213 - DNA, 84 bp, synthetic construct
  source 1..84: mol_type = other DNA
tttttttaagcagtggtatcaacgcagagtacnnattgtccgnngaatccganntttttttttttttttttttttttttttttt

SEQ ID NO: 1214 - DNA, 84 bp, synthetic construct
  source 1..84: mol_type = other DNA
tttttttaagcagtggtatcaacgcagagtacnnattgtccgnnttacggtgnntttttttttttttttttttttttttttttt

SEQ ID NO: 1215 - DNA, 84 bp, synthetic construct
  source 1..84: mol_type = other DNA
tttttttaagcagtggtatcaacgcagagtacnnattgtccgnncatatcggnntttttttttttttttttttttttttttttt

SEQ ID NO: 1216 - DNA, 84 bp, synthetic construct
  source 1..84: mol_type = other DNA
tttttttaagcagtggtatcaacgcagagtacnnattgtccgnncttcggtanntttttttttttttttttttttttttttttt

SEQ ID NO: 1217 - DNA, 84 bp, synthetic construct
  source 1..84: mol_type = other DNA
tttttttaagcagtggtatcaacgcagagtacnnattgtccgnntcctaacgnntttttttttttttttttttttttttttttt

SEQ ID NO: 1218 - DNA, 84 bp, synthetic construct
  source 1..84: mol_type = other DNA
tttttttaagcagtggtatcaacgcagagtacnnattgtccgnngtaagccanntttttttttttttttttttttttttttttt

SEQ ID NO: 1219 - DNA, 84 bp, synthetic construct
  source 1..84: mol_type = other DNA
tttttttaagcagtggtatcaacgcagagtacnnattgtccgnntaaggtggnntttttttttttttttttttttttttttttt

SEQ ID NO: 1220 - DNA, 84 bp, synthetic construct
  source 1..84: mol_type = other DNA
tttttttaagcagtggtatcaacgcagagtacnnattgtccgnnggtaagctnntttttttttttttttttttttttttttttt

SEQ ID NO: 1221 - DNA, 84 bp, synthetic construct
  source 1..84: mol_type = other DNA
tttttttaagcagtggtatcaacgcagagtacnnattgtccgnntgtgtcganntttttttttttttttttttttttttttttt

SEQ ID NO: 1222 - DNA, 84 bp, synthetic construct
  source 1..84: mol_type = other DNA
tttttttaagcagtggtatcaacgcagagtacnnattgtccgnngagcatganntttttttttttttttttttttttttttttt

SEQ ID NO: 1223 - DNA, 84 bp, synthetic construct
  source 1..84: mol_type = other DNA
tttttttaagcagtggtatcaacgcagagtacnnattgtccgnntcgaagtcnntttttttttttttttttttttttttttttt

SEQ ID NO: 1224 - DNA, 84 bp, synthetic construct
  source 1..84: mol_type = other DNA
tttttttaagcagtggtatcaacgcagagtacnnattgtccgnnggtgaacanntttttttttttttttttttttttttttttt

SEQ ID NO: 1225 - DNA, 84 bp, synthetic construct
  source 1..84: mol_type = other DNA
tttttttaagcagtggtatcaacgcagagtacnnattgtccgnnacatgcacnntttttttttttttttttttttttttttttt

SEQ ID NO: 1226 - DNA, 84 bp, synthetic construct
  source 1..84: mol_type = other DNA
tttttttaagcagtggtatcaacgcagagtacnnattgtccgnnccaacagtnntttttttttttttttttttttttttttttt

SEQ ID NO: 1227 - DNA, 84 bp, synthetic construct
  source 1..84: mol_type = other DNA
tttttttaagcagtggtatcaacgcagagtacnnattgtccgnnagaacagcnntttttttttttttttttttttttttttttt

SEQ ID NO: 1228 - DNA, 84 bp, synthetic construct
  source 1..84: mol_type = other DNA
tttttttaagcagtggtatcaacgcagagtacnnattgtccgnngaacacgtnntttttttttttttttttttttttttttttt

SEQ ID NO: 1229 - DNA, 84 bp, synthetic construct
  source 1..84: mol_type = other DNA
tttttttaagcagtggtatcaacgcagagtacnnattgtccgnnggtcttcanntttttttttttttttttttttttttttttt

SEQ ID NO: 1230 - DNA, 84 bp, synthetic construct
  source 1..84: mol_type = other DNA
tttttttaagcagtggtatcaacgcagagtacnnattgtccgnnaggttcagnntttttttttttttttttttttttttttttt

SEQ ID NO: 1231 - DNA, 84 bp, synthetic construct
  source 1..84: mol_type = other DNA
tttttttaagcagtggtatcaacgcagagtacnnattgtccgnnctagagcanntttttttttttttttttttttttttttttt

SEQ ID NO: 1232 - DNA, 84 bp, synthetic construct
  source 1..84: mol_type = other DNA
tttttttaagcagtggtatcaacgcagagtacnnattgtccgnncttctagcnntttttttttttttttttttttttttttttt

SEQ ID NO: 1233 - DNA, 84 bp, synthetic construct
  source 1..84: mol_type = other DNA
tttttttaagcagtggtatcaacgcagagtacnnattgtccgnngagtaacgnntttttttttttttttttttttttttttttt

SEQ ID NO: 1234 - DNA, 84 bp, synthetic construct
  source 1..84: mol_type = other DNA
tttttttaagcagtggtatcaacgcagagtacnnattgtccgnnctaagaggnntttttttttttttttttttttttttttttt

SEQ ID NO: 1235 - DNA, 84 bp, synthetic construct
  source 1..84: mol_type = other DNA
tttttttaagcagtggtatcaacgcagagtacnnattgtccgnnacgtgtagnntttttttttttttttttttttttttttttt

SEQ ID NO: 1236 - DNA, 84 bp, synthetic construct
  source 1..84: mol_type = other DNA
tttttttaagcagtggtatcaacgcagagtacnnattgtccgnnactacaggnntttttttttttttttttttttttttttttt

SEQ ID NO: 1237 - DNA, 84 bp, synthetic construct
  source 1..84: mol_type = other DNA
tttttttaagcagtggtatcaacgcagagtacnnattgtccgnntacaggtcnntttttttttttttttttttttttttttttt

SEQ ID NO: 1238 - DNA, 84 bp, synthetic construct
  source 1..84: mol_type = other DNA
tttttttaagcagtggtatcaacgcagagtacnnattgtccgnnctcacatgnntttttttttttttttttttttttttttttt

SEQ ID NO: 1239 - DNA, 84 bp, synthetic construct
  source 1..84: mol_type = other DNA
tttttttaagcagtggtatcaacgcagagtacnnattgtccgnnactaggagnntttttttttttttttttttttttttttttt

SEQ ID NO: 1240 - DNA, 84 bp, synthetic construct
  source 1..84: mol_type = other DNA
tttttttaagcagtggtatcaacgcagagtacnnattgtccgnnccatagganntttttttttttttttttttttttttttttt

SEQ ID NO: 1241 - DNA, 84 bp, synthetic construct
  source 1..84: mol_type = other DNA
tttttttaagcagtggtatcaacgcagagtacnnattgtccgnnggagaatcnntttttttttttttttttttttttttttttt

SEQ ID NO: 1242 - DNA, 84 bp, synthetic construct
  source 1..84: mol_type = other DNA
tttttttaagcagtggtatcaacgcagagtacnnattgtccgnngccaagaanntttttttttttttttttttttttttttttt

SEQ ID NO: 1243 - DNA, 84 bp, synthetic construct
  source 1..84: mol_type = other DNA
tttttttaagcagtggtatcaacgcagagtacnnattgtccgnnaaggcaagnntttttttttttttttttttttttttttttt

SEQ ID NO: 1244 - DNA, 84 bp, synthetic construct
  source 1..84: mol_type = other DNA
tttttttaagcagtggtatcaacgcagagtacnnattgtccgnnaatgtcgcnntttttttttttttttttttttttttttttt

SEQ ID NO: 1245 - DNA, 84 bp, synthetic construct
  source 1..84: mol_type = other DNA
tttttttaagcagtggtatcaacgcagagtacnnattgtccgnnatggaaccnntttttttttttttttttttttttttttttt

SEQ ID NO: 1246 - DNA, 84 bp, synthetic construct
  source 1..84: mol_type = other DNA
tttttttaagcagtggtatcaacgcagagtacnnattgtccgnnagaggcatnntttttttttttttttttttttttttttttt

SEQ ID NO: 1247 - DNA, 84 bp, synthetic construct
  source 1..84: mol_type = other DNA
tttttttaagcagtggtatcaacgcagagtacnnattgtccgnntgcatagcnntttttttttttttttttttttttttttttt

SEQ ID NO: 1248 - DNA, 84 bp, synthetic construct
  source 1..84: mol_type = other DNA
tttttttaagcagtggtatcaacgcagagtacnnattgtccgnnctaacgganntttttttttttttttttttttttttttttt

SEQ ID NO: 1249 - DNA, 84 bp, synthetic construct
  source 1..84: mol_type = other DNA
tttttttaagcagtggtatcaacgcagagtacnnattgtccgnntatcgaggnntttttttttttttttttttttttttttttt

SEQ ID NO: 1250 - DNA, 84 bp, synthetic construct
  source 1..84: mol_type = other DNA
tttttttaagcagtggtatcaacgcagagtacnnattgtccgnncatagcctnntttttttttttttttttttttttttttttt

SEQ ID NO: 1251 - DNA, 84 bp, synthetic construct
  source 1..84: mol_type = other DNA
tttttttaagcagtggtatcaacgcagagtacnnattgtccgnnatcgagacnntttttttttttttttttttttttttttttt

SEQ ID NO: 1252 - DNA, 84 bp, synthetic construct
  source 1..84: mol_type = other DNA
tttttttaagcagtggtatcaacgcagagtacnnattgtccgnnggaagagtnntttttttttttttttttttttttttttttt

SEQ ID NO: 1253 - DNA, 84 bp, synthetic construct
  source 1..84: mol_type = other DNA
tttttttaagcagtggtatcaacgcagagtacnnattgtccgnnccaagtagnntttttttttttttttttttttttttttttt

SEQ ID NO: 1254 - DNA, 84 bp, synthetic construct
  source 1..84: mol_type = other DNA
tttttttaagcagtggtatcaacgcagagtacnnattgtccgnnctgaacagnntttttttttttttttttttttttttttttt

SEQ ID NO: 1255 - DNA, 84 bp, synthetic construct
  source 1..84: mol_type = other DNA
tttttttaagcagtggtatcaacgcagagtacnnattgtccgnngtaggttcnntttttttttttttttttttttttttttttt

SEQ ID NO: 1256 - DNA, 84 bp, synthetic construct
  source 1..84: mol_type = other DNA
tttttttaagcagtggtatcaacgcagagtacnnattgtccgnngtatggacnntttttttttttttttttttttttttttttt

SEQ ID NO: 1257 - DNA, 84 bp, synthetic construct
  source 1..84: mol_type = other DNA
tttttttaagcagtggtatcaacgcagagtacnnattgtccgnntcgcaacanntttttttttttttttttttttttttttttt

SEQ ID NO: 1258 - DNA, 84 bp, synthetic construct
  source 1..84: mol_type = other DNA
tttttttaagcagtggtatcaacgcagagtacnnattgtccgnnccgctaatnntttttttttttttttttttttttttttttt

SEQ ID NO: 1259 - DNA, 84 bp, synthetic construct
  source 1..84: mol_type = other DNA
tttttttaagcagtggtatcaacgcagagtacnnattgtccgnngattcgcanntttttttttttttttttttttttttttttt

SEQ ID NO: 1260 - DNA, 84 bp, synthetic construct
  source 1..84: mol_type = other DNA
tttttttaagcagtggtatcaacgcagagtacnnattgtccgnncgatggaanntttttttttttttttttttttttttttttt

SEQ ID NO: 1261 - DNA, 84 bp, synthetic construct
  source 1..84: mol_type = other DNA
tttttttaagcagtggtatcaacgcagagtacnnattgtccgnnagcaagganntttttttttttttttttttttttttttttt

SEQ ID NO: 1262 - DNA, 84 bp, synthetic construct
  source 1..84: mol_type = other DNA
tttttttaagcagtggtatcaacgcagagtacnnattgtccgnncgtagcaanntttttttttttttttttttttttttttttt

SEQ ID NO: 1263 - DNA, 84 bp, synthetic construct
  source 1..84: mol_type = other DNA
tttttttaagcagtggtatcaacgcagagtacnnattgtccgnntggcagtanntttttttttttttttttttttttttttttt

SEQ ID NO: 1264 - DNA, 84 bp, synthetic construct
  source 1..84: mol_type = other DNA
tttttttaagcagtggtatcaacgcagagtacnnattgtccgnncggtagttnntttttttttttttttttttttttttttttt

SEQ ID NO: 1265 - DNA, 84 bp, synthetic construct
  source 1..84: mol_type = other DNA
tttttttaagcagtggtatcaacgcagagtacnnattgtccgnntgacttcgnntttttttttttttttttttttttttttttt

SEQ ID NO: 1266 - DNA, 84 bp, synthetic construct
  source 1..84: mol_type = other DNA
tttttttaagcagtggtatcaacgcagagtacnnattgtccgnngagtgcaanntttttttttttttttttttttttttttttt

SEQ ID NO: 1267 - DNA, 84 bp, synthetic construct
  source 1..84: mol_type = other DNA
tttttttaagcagtggtatcaacgcagagtacnnattgtccgnnacggtaacnntttttttttttttttttttttttttttttt

SEQ ID NO: 1268 - DNA, 84 bp, synthetic construct
  source 1..84: mol_type = other DNA
tttttttaagcagtggtatcaacgcagagtacnnattgtccgnnaagtggtgnntttttttttttttttttttttttttttttt

SEQ ID NO: 1269 - DNA, 84 bp, synthetic construct
  source 1..84: mol_type = other DNA
tttttttaagcagtggtatcaacgcagagtacnnattgtccgnnggagacaanntttttttttttttttttttttttttttttt

SEQ ID NO: 1270 - DNA, 84 bp, synthetic construct
  source 1..84: mol_type = other DNA
tttttttaagcagtggtatcaacgcagagtacnnattgtccgnntcaaggacnntttttttttttttttttttttttttttttt

SEQ ID NO: 1271 - DNA, 84 bp, synthetic construct
  source 1..84: mol_type = other DNA
tttttttaagcagtggtatcaacgcagagtacnnattgtccgnnaagagagcnntttttttttttttttttttttttttttttt

SEQ ID NO: 1272 - DNA, 84 bp, synthetic construct
  source 1..84: mol_type = other DNA
tttttttaagcagtggtatcaacgcagagtacnnattgtccgnncgagagatnntttttttttttttttttttttttttttttt

SEQ ID NO: 1273 - DNA, 84 bp, synthetic construct
  source 1..84: mol_type = other DNA
tttttttaagcagtggtatcaacgcagagtacnnattgtccgnnacagatggnntttttttttttttttttttttttttttttt

SEQ ID NO: 1274 - DNA, 84 bp, synthetic construct
  source 1..84: mol_type = other DNA
tttttttaagcagtggtatcaacgcagagtacnnattgtccgnnaggagtcanntttttttttttttttttttttttttttttt

SEQ ID NO: 1275 - DNA, 84 bp, synthetic construct
  source 1..84: mol_type = other DNA
tttttttaagcagtggtatcaacgcagagtacnnattgtccgnncgtgttacnntttttttttttttttttttttttttttttt

SEQ ID NO: 1276 - DNA, 84 bp, synthetic construct
  source 1..84: mol_type = other DNA
tttttttaagcagtggtatcaacgcagagtacnnattgtccgnntagtgtgcnntttttttttttttttttttttttttttttt

SEQ ID NO: 1277 - DNA, 84 bp, synthetic construct
  source 1..84: mol_type = other DNA
tttttttaagcagtggtatcaacgcagagtacnnattgtccgnnctcatgacnntttttttttttttttttttttttttttttt

SEQ ID NO: 1278 - DNA, 84 bp, synthetic construct
  source 1..84: mol_type = other DNA
tttttttaagcagtggtatcaacgcagagtacnnattgtccgnngtatccagnntttttttttttttttttttttttttttttt

SEQ ID NO: 1279 - DNA, 84 bp, synthetic construct
  source 1..84: mol_type = other DNA
tttttttaagcagtggtatcaacgcagagtacnnattgtccgnnacgcctatnntttttttttttttttttttttttttttttt

SEQ ID NO: 1280 - DNA, 84 bp, synthetic construct
  source 1..84: mol_type = other DNA
tttttttaagcagtggtatcaacgcagagtacnnattgtccgnnaacgacctnntttttttttttttttttttttttttttttt

SEQ ID NO: 1281 - DNA, 84 bp, synthetic construct
  source 1..84: mol_type = other DNA
tttttttaagcagtggtatcaacgcagagtacnnattgtccgnnatcaggctnntttttttttttttttttttttttttttttt

SEQ ID NO: 1282 - DNA, 84 bp, synthetic construct
  source 1..84: mol_type = other DNA
tttttttaagcagtggtatcaacgcagagtacnnattgtccgnncaagttcgnntttttttttttttttttttttttttttttt

SEQ ID NO: 1283 - DNA, 84 bp, synthetic construct
  source 1..84: mol_type = other DNA
tttttttaagcagtggtatcaacgcagagtacnnattgtccgnntagccaganntttttttttttttttttttttttttttttt

SEQ ID NO: 1284 - DNA, 84 bp, synthetic construct
  source 1..84: mol_type = other DNA
tttttttaagcagtggtatcaacgcagagtacnnattgtccgnncaatcacgnntttttttttttttttttttttttttttttt

SEQ ID NO: 1285 - DNA, 84 bp, synthetic construct
  source 1..84: mol_type = other DNA
tttttttaagcagtggtatcaacgcagagtacnnattgtccgnngcaacaagnntttttttttttttttttttttttttttttt

SEQ ID NO: 1286 - DNA, 84 bp, synthetic construct
  source 1..84: mol_type = other DNA
tttttttaagcagtggtatcaacgcagagtacnnattgtccgnncacgacaanntttttttttttttttttttttttttttttt

SEQ ID NO: 1287 - DNA, 84 bp, synthetic construct
  source 1..84: mol_type = other DNA
tttttttaagcagtggtatcaacgcagagtacnnattgtccgnntacggaganntttttttttttttttttttttttttttttt

SEQ ID NO: 1288 - DNA, 84 bp, synthetic construct
  source 1..84: mol_type = other DNA
tttttttaagcagtggtatcaacgcagagtacnnattgtccgnncgacaaganntttttttttttttttttttttttttttttt

SEQ ID NO: 1289 - DNA, 84 bp, synthetic construct
  source 1..84: mol_type = other DNA
tttttttaagcagtggtatcaacgcagagtacnnattgtccgnncgaagtganntttttttttttttttttttttttttttttt

SEQ ID NO: 1290 - DNA, 84 bp, synthetic construct
  source 1..84: mol_type = other DNA
tttttttaagcagtggtatcaacgcagagtacnnattgtccgnnagctggtanntttttttttttttttttttttttttttttt

SEQ ID NO: 1291 - DNA, 84 bp, synthetic construct
  source 1..84: mol_type = other DNA
tttttttaagcagtggtatcaacgcagagtacnnattgtccgnnaactaggcnntttttttttttttttttttttttttttttt

SEQ ID NO: 1292 - DNA, 84 bp, synthetic construct
  source 1..84: mol_type = other DNA
tttttttaagcagtggtatcaacgcagagtacnnattgtccgnncagcaagtnntttttttttttttttttttttttttttttt

SEQ ID NO: 1293 - DNA, 84 bp, synthetic construct
  source 1..84: mol_type = other DNA
tttttttaagcagtggtatcaacgcagagtacnnattgtccgnnacgaggtanntttttttttttttttttttttttttttttt

SEQ ID NO: 1294 - DNA, 84 bp, synthetic construct
  source 1..84: mol_type = other DNA
tttttttaagcagtggtatcaacgcagagtacnnattgtccgnncatcttccnntttttttttttttttttttttttttttttt

SEQ ID NO: 1295 - DNA, 84 bp, synthetic construct
  source 1..84: mol_type = other DNA
tttttttaagcagtggtatcaacgcagagtacnnattgtccgnncctgaatcnntttttttttttttttttttttttttttttt

SEQ ID NO: 1296 - DNA, 84 bp, synthetic construct
  source 1..84: mol_type = other DNA
tttttttaagcagtggtatcaacgcagagtacnnattgtccgnntgcagactnntttttttttttttttttttttttttttttt

SEQ ID NO: 1297 - DNA, 84 bp, synthetic construct
  source 1..84: mol_type = other DNA
tttttttaagcagtggtatcaacgcagagtacnnattgtccgnnagatgtggnntttttttttttttttttttttttttttttt

SEQ ID NO: 1298 - DNA, 84 bp, synthetic construct
  source 1..84: mol_type = other DNA
tttttttaagcagtggtatcaacgcagagtacnnattgtccgnnagttcgacnntttttttttttttttttttttttttttttt

SEQ ID NO: 1299 - DNA, 84 bp, synthetic construct
  source 1..84: mol_type = other DNA
tttttttaagcagtggtatcaacgcagagtacnnattgtccgnnacaacctcnntttttttttttttttttttttttttttttt

SEQ ID NO: 1300 - DNA, 84 bp, synthetic construct
  source 1..84: mol_type = other DNA
tttttttaagcagtggtatcaacgcagagtacnnattgtccgnncatggtagnntttttttttttttttttttttttttttttt

SEQ ID NO: 1301 - DNA, 84 bp, synthetic construct
  source 1..84: mol_type = other DNA
tttttttaagcagtggtatcaacgcagagtacnnattgtccgnncgtatctcnntttttttttttttttttttttttttttttt

SEQ ID NO: 1302 - DNA, 84 bp, synthetic construct
  source 1..84: mol_type = other DNA
tttttttaagcagtggtatcaacgcagagtacnnattgtccgnncctagttcnntttttttttttttttttttttttttttttt

SEQ ID NO: 1303 - DNA, 84 bp, synthetic construct
  source 1..84: mol_type = other DNA
tttttttaagcagtggtatcaacgcagagtacnnattgtccgnncaagagtcnntttttttttttttttttttttttttttttt

SEQ ID NO: 1304 - DNA, 84 bp, synthetic construct
  source 1..84: mol_type = other DNA
tttttttaagcagtggtatcaacgcagagtacnntgtccgatnnaatcggcanntttttttttttttttttttttttttttttt

SEQ ID NO: 1305 - DNA, 84 bp, synthetic construct
  source 1..84: mol_type = other DNA
tttttttaagcagtggtatcaacgcagagtacnntgtccgatnntacggcatnntttttttttttttttttttttttttttttt

SEQ ID NO: 1306 - DNA, 84 bp, synthetic construct
  source 1..84: mol_type = other DNA
tttttttaagcagtggtatcaacgcagagtacnntgtccgatnnttggatcgnntttttttttttttttttttttttttttttt

SEQ ID NO: 1307 - DNA, 84 bp, synthetic construct
  source 1..84: mol_type = other DNA
tttttttaagcagtggtatcaacgcagagtacnntgtccgatnntggaacganntttttttttttttttttttttttttttttt

SEQ ID NO: 1308 - DNA, 84 bp, synthetic construct
  source 1..84: mol_type = other DNA
tttttttaagcagtggtatcaacgcagagtacnntgtccgatnnggcaatcanntttttttttttttttttttttttttttttt

SEQ ID NO: 1309 - DNA, 84 bp, synthetic construct
  source 1..84: mol_type = other DNA
tttttttaagcagtggtatcaacgcagagtacnntgtccgatnngaatccganntttttttttttttttttttttttttttttt

SEQ ID NO: 1310 - DNA, 84 bp, synthetic construct
  source 1..84: mol_type = other DNA
tttttttaagcagtggtatcaacgcagagtacnntgtccgatnnttacggtgnntttttttttttttttttttttttttttttt

SEQ ID NO: 1311 - DNA, 84 bp, synthetic construct
  source 1..84: mol_type = other DNA
tttttttaagcagtggtatcaacgcagagtacnntgtccgatnncatatcggnntttttttttttttttttttttttttttttt

SEQ ID NO: 1312 - DNA, 84 bp, synthetic construct
  source 1..84: mol_type = other DNA
tttttttaagcagtggtatcaacgcagagtacnntgtccgatnncttcggtanntttttttttttttttttttttttttttttt

SEQ ID NO: 1313 - DNA, 84 bp, synthetic construct
  source 1..84: mol_type = other DNA
tttttttaagcagtggtatcaacgcagagtacnntgtccgatnntcctaacgnntttttttttttttttttttttttttttttt

SEQ ID NO: 1314 - DNA, 84 bp, synthetic construct
  source 1..84: mol_type = other DNA
tttttttaagcagtggtatcaacgcagagtacnntgtccgatnngtaagccanntttttttttttttttttttttttttttttt

SEQ ID NO: 1315 - DNA, 84 bp, synthetic construct
  source 1..84: mol_type = other DNA
tttttttaagcagtggtatcaacgcagagtacnntgtccgatnntaaggtggnntttttttttttttttttttttttttttttt

SEQ ID NO: 1316 - DNA, 84 bp, synthetic construct
  source 1..84: mol_type = other DNA
tttttttaagcagtggtatcaacgcagagtacnntgtccgatnnggtaagctnntttttttttttttttttttttttttttttt

SEQ ID NO: 1317 - DNA, 84 bp, synthetic construct
  source 1..84: mol_type = other DNA
tttttttaagcagtggtatcaacgcagagtacnntgtccgatnntgtgtcganntttttttttttttttttttttttttttttt

SEQ ID NO: 1318 - DNA, 84 bp, synthetic construct
  source 1..84: mol_type = other DNA
tttttttaagcagtggtatcaacgcagagtacnntgtccgatnngagcatganntttttttttttttttttttttttttttttt

SEQ ID NO: 1319 - DNA, 84 bp, synthetic construct
  source 1..84: mol_type = other DNA
tttttttaagcagtggtatcaacgcagagtacnntgtccgatnntcgaagtcnntttttttttttttttttttttttttttttt

SEQ ID NO: 1320 - DNA, 84 bp, synthetic construct
  source 1..84: mol_type = other DNA
tttttttaagcagtggtatcaacgcagagtacnntgtccgatnnggtgaacanntttttttttttttttttttttttttttttt

SEQ ID NO: 1321 - DNA, 84 bp, synthetic construct
  source 1..84: mol_type = other DNA
tttttttaagcagtggtatcaacgcagagtacnntgtccgatnnacatgcacnntttttttttttttttttttttttttttttt

SEQ ID NO: 1322 - DNA, 84 bp, synthetic construct
  source 1..84: mol_type = other DNA
tttttttaagcagtggtatcaacgcagagtacnntgtccgatnnccaacagtnntttttttttttttttttttttttttttttt

SEQ ID NO: 1323 - DNA, 84 bp, synthetic construct
  source 1..84: mol_type = other DNA
tttttttaagcagtggtatcaacgcagagtacnntgtccgatnnagaacagcnntttttttttttttttttttttttttttttt

SEQ ID NO: 1324 - DNA, 84 bp, synthetic construct
  source 1..84: mol_type = other DNA
tttttttaagcagtggtatcaacgcagagtacnntgtccgatnngaacacgtnntttttttttttttttttttttttttttttt

SEQ ID NO: 1325 - DNA, 84 bp, synthetic construct
  source 1..84: mol_type = other DNA
tttttttaagcagtggtatcaacgcagagtacnntgtccgatnnggtcttcanntttttttttttttttttttttttttttttt

SEQ ID NO: 1326 - DNA, 84 bp, synthetic construct
  source 1..84: mol_type = other DNA
tttttttaagcagtggtatcaacgcagagtacnntgtccgatnnaggttcagnntttttttttttttttttttttttttttttt

SEQ ID NO: 1327 - DNA, 84 bp, synthetic construct
  source 1..84: mol_type = other DNA
tttttttaagcagtggtatcaacgcagagtacnntgtccgatnnctagagcanntttttttttttttttttttttttttttttt

SEQ ID NO: 1328 - DNA, 84 bp, synthetic construct
  source 1..84: mol_type = other DNA
tttttttaagcagtggtatcaacgcagagtacnntgtccgatnncttctagcnntttttttttttttttttttttttttttttt

SEQ ID NO: 1329 - DNA, 84 bp, synthetic construct
  source 1..84: mol_type = other DNA
tttttttaagcagtggtatcaacgcagagtacnntgtccgatnngagtaacgnntttttttttttttttttttttttttttttt

SEQ ID NO: 1330 - DNA, 84 bp, synthetic construct
  source 1..84: mol_type = other DNA
tttttttaagcagtggtatcaacgcagagtacnntgtccgatnnctaagaggnntttttttttttttttttttttttttttttt

SEQ ID NO: 1331 - DNA, 84 bp, synthetic construct
  source 1..84: mol_type = other DNA
tttttttaagcagtggtatcaacgcagagtacnntgtccgatnnacgtgtagnntttttttttttttttttttttttttttttt

SEQ ID NO: 1332 - DNA, 84 bp, synthetic construct
  source 1..84: mol_type = other DNA
tttttttaagcagtggtatcaacgcagagtacnntgtccgatnnactacaggnntttttttttttttttttttttttttttttt

SEQ ID NO: 1333 - DNA, 84 bp, synthetic construct
  source 1..84: mol_type = other DNA
tttttttaagcagtggtatcaacgcagagtacnntgtccgatnntacaggtcnntttttttttttttttttttttttttttttt

SEQ ID NO: 1334 - DNA, 84 bp, synthetic construct
  source 1..84: mol_type = other DNA
tttttttaagcagtggtatcaacgcagagtacnntgtccgatnnctcacatgnntttttttttttttttttttttttttttttt

SEQ ID NO: 1335 - DNA, 84 bp, synthetic construct
  source 1..84: mol_type = other DNA
tttttttaagcagtggtatcaacgcagagtacnntgtccgatnnactaggagnntttttttttttttttttttttttttttttt

SEQ ID NO: 1336 - DNA, 84 bp, synthetic construct
  source 1..84: mol_type = other DNA
tttttttaagcagtggtatcaacgcagagtacnntgtccgatnnccatagganntttttttttttttttttttttttttttttt

SEQ ID NO: 1337 - DNA, 84 bp, synthetic construct
  source 1..84: mol_type = other DNA
tttttttaagcagtggtatcaacgcagagtacnntgtccgatnnggagaatcnntttttttttttttttttttttttttttttt

SEQ ID NO: 1338 - DNA, 84 bp, synthetic construct
  source 1..84: mol_type = other DNA
tttttttaagcagtggtatcaacgcagagtacnntgtccgatnngccaagaanntttttttttttttttttttttttttttttt

SEQ ID NO: 1339 - DNA, 84 bp, synthetic construct
  source 1..84: mol_type = other DNA
tttttttaagcagtggtatcaacgcagagtacnntgtccgatnnaaggcaagnntttttttttttttttttttttttttttttt

SEQ ID NO: 1340 - DNA, 84 bp, synthetic construct
  source 1..84: mol_type = other DNA
tttttttaagcagtggtatcaacgcagagtacnntgtccgatnnaatgtcgcnntttttttttttttttttttttttttttttt

SEQ ID NO: 1341 - DNA, 84 bp, synthetic construct
  source 1..84: mol_type = other DNA
tttttttaagcagtggtatcaacgcagagtacnntgtccgatnnatggaaccnntttttttttttttttttttttttttttttt

SEQ ID NO: 1342 - DNA, 84 bp, synthetic construct
  source 1..84: mol_type = other DNA
tttttttaagcagtggtatcaacgcagagtacnntgtccgatnnagaggcatnntttttttttttttttttttttttttttttt

SEQ ID NO: 1343 - DNA, 84 bp, synthetic construct
  source 1..84: mol_type = other DNA
tttttttaagcagtggtatcaacgcagagtacnntgtccgatnntgcatagcnntttttttttttttttttttttttttttttt

SEQ ID NO: 1344 - DNA, 84 bp, synthetic construct
  source 1..84: mol_type = other DNA
tttttttaagcagtggtatcaacgcagagtacnntgtccgatnnctaacgganntttttttttttttttttttttttttttttt

SEQ ID NO: 1345 - DNA, 84 bp, synthetic construct
  source 1..84: mol_type = other DNA
tttttttaagcagtggtatcaacgcagagtacnntgtccgatnntatcgaggnntttttttttttttttttttttttttttttt

SEQ ID NO: 1346 - DNA, 84 bp, synthetic construct
  source 1..84: mol_type = other DNA
tttttttaagcagtggtatcaacgcagagtacnntgtccgatnncatagcctnntttttttttttttttttttttttttttttt

SEQ ID NO: 1347 - DNA, 84 bp, synthetic construct
  source 1..84: mol_type = other DNA
tttttttaagcagtggtatcaacgcagagtacnntgtccgatnnatcgagacnntttttttttttttttttttttttttttttt

SEQ ID NO: 1348 - DNA, 84 bp, synthetic construct
  source 1..84: mol_type = other DNA
tttttttaagcagtggtatcaacgcagagtacnntgtccgatnnggaagagtnntttttttttttttttttttttttttttttt

SEQ ID NO: 1349 - DNA, 84 bp, synthetic construct
  source 1..84: mol_type = other DNA
tttttttaagcagtggtatcaacgcagagtacnntgtccgatnnccaagtagnntttttttttttttttttttttttttttttt

SEQ ID NO: 1350 - DNA, 84 bp, synthetic construct
  source 1..84: mol_type = other DNA
tttttttaagcagtggtatcaacgcagagtacnntgtccgatnnctgaacagnntttttttttttttttttttttttttttttt

SEQ ID NO: 1351 - DNA, 84 bp, synthetic construct
  source 1..84: mol_type = other DNA
tttttttaagcagtggtatcaacgcagagtacnntgtccgatnngtaggttcnntttttttttttttttttttttttttttttt

SEQ ID NO: 1352 - DNA, 84 bp, synthetic construct
  source 1..84: mol_type = other DNA
tttttttaagcagtggtatcaacgcagagtacnntgtccgatnngtatggacnntttttttttttttttttttttttttttttt

SEQ ID NO: 1353 - DNA, 84 bp, synthetic construct
  source 1..84: mol_type = other DNA
tttttttaagcagtggtatcaacgcagagtacnntgtccgatnntcgcaacanntttttttttttttttttttttttttttttt

SEQ ID NO: 1354 - DNA, 84 bp, synthetic construct
  source 1..84: mol_type = other DNA
tttttttaagcagtggtatcaacgcagagtacnntgtccgatnnccgctaatnntttttttttttttttttttttttttttttt

SEQ ID NO: 1355 - DNA, 84 bp, synthetic construct
  source 1..84: mol_type = other DNA
tttttttaagcagtggtatcaacgcagagtacnntgtccgatnngattcgcanntttttttttttttttttttttttttttttt

SEQ ID NO: 1356 - DNA, 84 bp, synthetic construct
  source 1..84: mol_type = other DNA
tttttttaagcagtggtatcaacgcagagtacnntgtccgatnncgatggaanntttttttttttttttttttttttttttttt

SEQ ID NO: 1357 - DNA, 84 bp, synthetic construct
  source 1..84: mol_type = other DNA
tttttttaagcagtggtatcaacgcagagtacnntgtccgatnnagcaagganntttttttttttttttttttttttttttttt

SEQ ID NO: 1358 - DNA, 84 bp, synthetic construct
  source 1..84: mol_type = other DNA
tttttttaagcagtggtatcaacgcagagtacnntgtccgatnncgtagcaanntttttttttttttttttttttttttttttt

SEQ ID NO: 1359 - DNA, 84 bp, synthetic construct
  source 1..84: mol_type = other DNA
tttttttaagcagtggtatcaacgcagagtacnntgtccgatnntggcagtanntttttttttttttttttttttttttttttt

SEQ ID NO: 1360 - DNA, 84 bp, synthetic construct
  source 1..84: mol_type = other DNA
tttttttaagcagtggtatcaacgcagagtacnntgtccgatnncggtagttnntttttttttttttttttttttttttttttt

SEQ ID NO: 1361 - DNA, 84 bp, synthetic construct
  source 1..84: mol_type = other DNA
tttttttaagcagtggtatcaacgcagagtacnntgtccgatnntgacttcgnntttttttttttttttttttttttttttttt

SEQ ID NO: 1362 - DNA, 84 bp, synthetic construct
  source 1..84: mol_type = other DNA
tttttttaagcagtggtatcaacgcagagtacnntgtccgatnngagtgcaanntttttttttttttttttttttttttttttt

SEQ ID NO: 1363 - DNA, 84 bp, synthetic construct
  source 1..84: mol_type = other DNA
tttttttaagcagtggtatcaacgcagagtacnntgtccgatnnacggtaacnntttttttttttttttttttttttttttttt

SEQ ID NO: 1364 - DNA, 84 bp, synthetic construct
  source 1..84: mol_type = other DNA
tttttttaagcagtggtatcaacgcagagtacnntgtccgatnnaagtggtgnntttttttttttttttttttttttttttttt

SEQ ID NO: 1365 - DNA, 84 bp, synthetic construct
  source 1..84: mol_type = other DNA
tttttttaagcagtggtatcaacgcagagtacnntgtccgatnnggagacaanntttttttttttttttttttttttttttttt

SEQ ID NO: 1366 - DNA, 84 bp, synthetic construct
  source 1..84: mol_type = other DNA
tttttttaagcagtggtatcaacgcagagtacnntgtccgatnntcaaggacnntttttttttttttttttttttttttttttt

SEQ ID NO: 1367 - DNA, 84 bp, synthetic construct
  source 1..84: mol_type = other DNA
tttttttaagcagtggtatcaacgcagagtacnntgtccgatnnaagagagcnntttttttttttttttttttttttttttttt

SEQ ID NO: 1368 - DNA, 84 bp, synthetic construct
  source 1..84: mol_type = other DNA
tttttttaagcagtggtatcaacgcagagtacnntgtccgatnncgagagatnntttttttttttttttttttttttttttttt

SEQ ID NO: 1369 - DNA, 84 bp, synthetic construct
  source 1..84: mol_type = other DNA
tttttttaagcagtggtatcaacgcagagtacnntgtccgatnnacagatggnntttttttttttttttttttttttttttttt

SEQ ID NO: 1370 - DNA, 84 bp, synthetic construct
  source 1..84: mol_type = other DNA
tttttttaagcagtggtatcaacgcagagtacnntgtccgatnnaggagtcanntttttttttttttttttttttttttttttt

SEQ ID NO: 1371 - DNA, 84 bp, synthetic construct
  source 1..84: mol_type = other DNA
tttttttaagcagtggtatcaacgcagagtacnntgtccgatnncgtgttacnntttttttttttttttttttttttttttttt

SEQ ID NO: 1372 - DNA, 84 bp, synthetic construct
  source 1..84: mol_type = other DNA
tttttttaagcagtggtatcaacgcagagtacnntgtccgatnntagtgtgcnntttttttttttttttttttttttttttttt

SEQ ID NO: 1373 - DNA, 84 bp, synthetic construct
  source 1..84: mol_type = other DNA
tttttttaagcagtggtatcaacgcagagtacnntgtccgatnnctcatgacnntttttttttttttttttttttttttttttt

SEQ ID NO: 1374 - DNA, 84 bp, synthetic construct
  source 1..84: mol_type = other DNA
tttttttaagcagtggtatcaacgcagagtacnntgtccgatnngtatccagnntttttttttttttttttttttttttttttt

SEQ ID NO: 1375 - DNA, 84 bp, synthetic construct
  source 1..84: mol_type = other DNA
tttttttaagcagtggtatcaacgcagagtacnntgtccgatnnacgcctatnntttttttttttttttttttttttttttttt

SEQ ID NO: 1376 - DNA, 84 bp, synthetic construct
  source 1..84: mol_type = other DNA
tttttttaagcagtggtatcaacgcagagtacnntgtccgatnnaacgacctnntttttttttttttttttttttttttttttt

SEQ ID NO: 1377 - DNA, 84 bp, synthetic construct
  source 1..84: mol_type = other DNA
tttttttaagcagtggtatcaacgcagagtacnntgtccgatnnatcaggctnntttttttttttttttttttttttttttttt

SEQ ID NO: 1378 - DNA, 84 bp, synthetic construct
  source 1..84: mol_type = other DNA
tttttttaagcagtggtatcaacgcagagtacnntgtccgatnncaagttcgnntttttttttttttttttttttttttttttt

SEQ ID NO: 1379 - DNA, 84 bp, synthetic construct
  source 1..84: mol_type = other DNA
tttttttaagcagtggtatcaacgcagagtacnntgtccgatnntagccaganntttttttttttttttttttttttttttttt

SEQ ID NO: 1380 - DNA, 84 bp, synthetic construct
  source 1..84: mol_type = other DNA
tttttttaagcagtggtatcaacgcagagtacnntgtccgatnncaatcacgnntttttttttttttttttttttttttttttt

SEQ ID NO: 1381 - DNA, 84 bp, synthetic construct
  source 1..84: mol_type = other DNA
tttttttaagcagtggtatcaacgcagagtacnntgtccgatnngcaacaagnntttttttttttttttttttttttttttttt

SEQ ID NO: 1382 - DNA, 84 bp, synthetic construct
  source 1..84: mol_type = other DNA
tttttttaagcagtggtatcaacgcagagtacnntgtccgatnncacgacaanntttttttttttttttttttttttttttttt

SEQ ID NO: 1383 - DNA, 84 bp, synthetic construct
  source 1..84: mol_type = other DNA
tttttttaagcagtggtatcaacgcagagtacnntgtccgatnntacggaganntttttttttttttttttttttttttttttt

SEQ ID NO: 1384 - DNA, 84 bp, synthetic construct
  source 1..84: mol_type = other DNA
tttttttaagcagtggtatcaacgcagagtacnntgtccgatnncgacaaganntttttttttttttttttttttttttttttt

SEQ ID NO: 1385 - DNA, 84 bp, synthetic construct
  source 1..84: mol_type = other DNA
tttttttaagcagtggtatcaacgcagagtacnntgtccgatnncgaagtganntttttttttttttttttttttttttttttt

SEQ ID NO: 1386 - DNA, 84 bp, synthetic construct
  source 1..84: mol_type = other DNA
tttttttaagcagtggtatcaacgcagagtacnntgtccgatnnagctggtanntttttttttttttttttttttttttttttt

SEQ ID NO: 1387 - DNA, 84 bp, synthetic construct
  source 1..84: mol_type = other DNA
tttttttaagcagtggtatcaacgcagagtacnntgtccgatnnaactaggcnntttttttttttttttttttttttttttttt

SEQ ID NO: 1388 - DNA, 84 bp, synthetic construct
  source 1..84: mol_type = other DNA
tttttttaagcagtggtatcaacgcagagtacnntgtccgatnncagcaagtnntttttttttttttttttttttttttttttt

SEQ ID NO: 1389 - DNA, 84 bp, synthetic construct
  source 1..84: mol_type = other DNA
tttttttaagcagtggtatcaacgcagagtacnntgtccgatnnacgaggtanntttttttttttttttttttttttttttttt

SEQ ID NO: 1390 - DNA, 84 bp, synthetic construct
  source 1..84: mol_type = other DNA
tttttttaagcagtggtatcaacgcagagtacnntgtccgatnncatcttccnntttttttttttttttttttttttttttttt

SEQ ID NO: 1391 - DNA, 84 bp, synthetic construct
  source 1..84: mol_type = other DNA
tttttttaagcagtggtatcaacgcagagtacnntgtccgatnncctgaatcnntttttttttttttttttttttttttttttt

SEQ ID NO: 1392 - DNA, 84 bp, synthetic construct
  source 1..84: mol_type = other DNA
tttttttaagcagtggtatcaacgcagagtacnntgtccgatnntgcagactnntttttttttttttttttttttttttttttt

SEQ ID NO: 1393 - DNA, 84 bp, synthetic construct
  source 1..84: mol_type = other DNA
tttttttaagcagtggtatcaacgcagagtacnntgtccgatnnagatgtggnntttttttttttttttttttttttttttttt

SEQ ID NO: 1394 - DNA, 84 bp, synthetic construct
  source 1..84: mol_type = other DNA
tttttttaagcagtggtatcaacgcagagtacnntgtccgatnnagttcgacnntttttttttttttttttttttttttttttt

SEQ ID NO: 1395 - DNA, 84 bp, synthetic construct
  source 1..84: mol_type = other DNA
tttttttaagcagtggtatcaacgcagagtacnntgtccgatnnacaacctcnntttttttttttttttttttttttttttttt

SEQ ID NO: 1396 - DNA, 84 bp, synthetic construct
  source 1..84: mol_type = other DNA
tttttttaagcagtggtatcaacgcagagtacnntgtccgatnncatggtagnntttttttttttttttttttttttttttttt

SEQ ID NO: 1397 - DNA, 84 bp, synthetic construct
  source 1..84: mol_type = other DNA
tttttttaagcagtggtatcaacgcagagtacnntgtccgatnncgtatctcnntttttttttttttttttttttttttttttt

SEQ ID NO: 1398 - DNA, 84 bp, synthetic construct
  source 1..84: mol_type = other DNA
tttttttaagcagtggtatcaacgcagagtacnntgtccgatnncctagttcnntttttttttttttttttttttttttttttt

SEQ ID NO: 1399 - DNA, 84 bp, synthetic construct
  source 1..84: mol_type = other DNA
tttttttaagcagtggtatcaacgcagagtacnntgtccgatnncaagagtcnntttttttttttttttttttttttttttttt

SEQ ID NO: 1400 - DNA, 84 bp, synthetic construct
  source 1..84: mol_type = other DNA
tttttttaagcagtggtatcaacgcagagtacnngctattcgnnaatcggcanntttttttttttttttttttttttttttttt

SEQ ID NO: 1401 - DNA, 84 bp, synthetic construct
  source 1..84: mol_type = other DNA
tttttttaagcagtggtatcaacgcagagtacnngctattcgnntacggcatnntttttttttttttttttttttttttttttt

SEQ ID NO: 1402 - DNA, 84 bp, synthetic construct
  source 1..84: mol_type = other DNA
tttttttaagcagtggtatcaacgcagagtacnngctattcgnnttggatcgnntttttttttttttttttttttttttttttt

SEQ ID NO: 1403 - DNA, 84 bp, synthetic construct
  source 1..84: mol_type = other DNA
tttttttaagcagtggtatcaacgcagagtacnngctattcgnntggaacganntttttttttttttttttttttttttttttt

SEQ ID NO: 1404 - DNA, 84 bp, synthetic construct
  source 1..84: mol_type = other DNA
tttttttaagcagtggtatcaacgcagagtacnngctattcgnnggcaatcanntttttttttttttttttttttttttttttt

SEQ ID NO: 1405 - DNA, 84 bp, synthetic construct
  source 1..84: mol_type = other DNA
tttttttaagcagtggtatcaacgcagagtacnngctattcgnngaatccganntttttttttttttttttttttttttttttt

SEQ ID NO: 1406 - DNA, 84 bp, synthetic construct
  source 1..84: mol_type = other DNA
tttttttaagcagtggtatcaacgcagagtacnngctattcgnnttacggtgnntttttttttttttttttttttttttttttt

SEQ ID NO: 1407 - DNA, 84 bp, synthetic construct
  source 1..84: mol_type = other DNA
tttttttaagcagtggtatcaacgcagagtacnngctattcgnncatatcggnntttttttttttttttttttttttttttttt

SEQ ID NO: 1408 - DNA, 84 bp, synthetic construct
  source 1..84: mol_type = other DNA
tttttttaagcagtggtatcaacgcagagtacnngctattcgnncttcggtanntttttttttttttttttttttttttttttt

SEQ ID NO: 1409 - DNA, 84 bp, synthetic construct
  source 1..84: mol_type = other DNA
tttttttaagcagtggtatcaacgcagagtacnngctattcgnntcctaacgnntttttttttttttttttttttttttttttt

SEQ ID NO: 1410 - DNA, 84 bp, synthetic construct
  source 1..84: mol_type = other DNA
tttttttaagcagtggtatcaacgcagagtacnngctattcgnngtaagccanntttttttttttttttttttttttttttttt

SEQ ID NO: 1411 - DNA, 84 bp, synthetic construct
  source 1..84: mol_type = other DNA
tttttttaagcagtggtatcaacgcagagtacnngctattcgnntaaggtggnntttttttttttttttttttttttttttttt

SEQ ID NO: 1412 - DNA, 84 bp, synthetic construct
  source 1..84: mol_type = other DNA
tttttttaagcagtggtatcaacgcagagtacnngctattcgnnggtaagctnntttttttttttttttttttttttttttttt

SEQ ID NO: 1413 - DNA, 84 bp, synthetic construct
  source 1..84: mol_type = other DNA
tttttttaagcagtggtatcaacgcagagtacnngctattcgnntgtgtcganntttttttttttttttttttttttttttttt

SEQ ID NO: 1414 - DNA, 84 bp, synthetic construct
  source 1..84: mol_type = other DNA
tttttttaagcagtggtatcaacgcagagtacnngctattcgnngagcatganntttttttttttttttttttttttttttttt

SEQ ID NO: 1415 - DNA, 84 bp, synthetic construct
  source 1..84: mol_type = other DNA
tttttttaagcagtggtatcaacgcagagtacnngctattcgnntcgaagtcnntttttttttttttttttttttttttttttt

SEQ ID NO: 1416 - DNA, 84 bp, synthetic construct
  source 1..84: mol_type = other DNA
tttttttaagcagtggtatcaacgcagagtacnngctattcgnnggtgaacanntttttttttttttttttttttttttttttt

SEQ ID NO: 1417 - DNA, 84 bp, synthetic construct
  source 1..84: mol_type = other DNA
tttttttaagcagtggtatcaacgcagagtacnngctattcgnnacatgcacnntttttttttttttttttttttttttttttt

SEQ ID NO: 1418 - DNA, 84 bp, synthetic construct
  source 1..84: mol_type = other DNA
tttttttaagcagtggtatcaacgcagagtacnngctattcgnnccaacagtnntttttttttttttttttttttttttttttt

SEQ ID NO: 1419 - DNA, 84 bp, synthetic construct
  source 1..84: mol_type = other DNA
tttttttaagcagtggtatcaacgcagagtacnngctattcgnnagaacagcnntttttttttttttttttttttttttttttt

SEQ ID NO: 1420 - DNA, 84 bp, synthetic construct
  source 1..84: mol_type = other DNA
tttttttaagcagtggtatcaacgcagagtacnngctattcgnngaacacgtnntttttttttttttttttttttttttttttt

SEQ ID NO: 1421 - DNA, 84 bp, synthetic construct
  source 1..84: mol_type = other DNA
tttttttaagcagtggtatcaacgcagagtacnngctattcgnnggtcttcanntttttttttttttttttttttttttttttt

SEQ ID NO: 1422 - DNA, 84 bp, synthetic construct
  source 1..84: mol_type = other DNA
tttttttaagcagtggtatcaacgcagagtacnngctattcgnnaggttcagnntttttttttttttttttttttttttttttt

SEQ ID NO: 1423 - DNA, 84 bp, synthetic construct
  source 1..84: mol_type = other DNA
tttttttaagcagtggtatcaacgcagagtacnngctattcgnnctagagcanntttttttttttttttttttttttttttttt

SEQ ID NO: 1424 - DNA, 84 bp, synthetic construct
  source 1..84: mol_type = other DNA
tttttttaagcagtggtatcaacgcagagtacnngctattcgnncttctagcnntttttttttttttttttttttttttttttt

SEQ ID NO: 1425 - DNA, 84 bp, synthetic construct
  source 1..84: mol_type = other DNA
tttttttaagcagtggtatcaacgcagagtacnngctattcgnngagtaacgnntttttttttttttttttttttttttttttt

SEQ ID NO: 1426 - DNA, 84 bp, synthetic construct
  source 1..84: mol_type = other DNA
tttttttaagcagtggtatcaacgcagagtacnngctattcgnnctaagaggnntttttttttttttttttttttttttttttt

SEQ ID NO: 1427 - DNA, 84 bp, synthetic construct
  source 1..84: mol_type = other DNA
tttttttaagcagtggtatcaacgcagagtacnngctattcgnnacgtgtagnntttttttttttttttttttttttttttttt

SEQ ID NO: 1428 - DNA, 84 bp, synthetic construct
  source 1..84: mol_type = other DNA
tttttttaagcagtggtatcaacgcagagtacnngctattcgnnactacaggnntttttttttttttttttttttttttttttt

SEQ ID NO: 1429 - DNA, 84 bp, synthetic construct
  source 1..84: mol_type = other DNA
tttttttaagcagtggtatcaacgcagagtacnngctattcgnntacaggtcnntttttttttttttttttttttttttttttt

SEQ ID NO: 1430 - DNA, 84 bp, synthetic construct
  source 1..84: mol_type = other DNA
tttttttaagcagtggtatcaacgcagagtacnngctattcgnnctcacatgnntttttttttttttttttttttttttttttt

SEQ ID NO: 1431 - DNA, 84 bp, synthetic construct
  source 1..84: mol_type = other DNA
tttttttaagcagtggtatcaacgcagagtacnngctattcgnnactaggagnntttttttttttttttttttttttttttttt

SEQ ID NO: 1432 - DNA, 84 bp, synthetic construct
  source 1..84: mol_type = other DNA
tttttttaagcagtggtatcaacgcagagtacnngctattcgnnccatagganntttttttttttttttttttttttttttttt

SEQ ID NO: 1433 - DNA, 84 bp, synthetic construct
  source 1..84: mol_type = other DNA
tttttttaagcagtggtatcaacgcagagtacnngctattcgnnggagaatcnntttttttttttttttttttttttttttttt

SEQ ID NO: 1434 - DNA, 84 bp, synthetic construct
  source 1..84: mol_type = other DNA
tttttttaagcagtggtatcaacgcagagtacnngctattcgnngccaagaanntttttttttttttttttttttttttttttt

SEQ ID NO: 1435 - DNA, 84 bp, synthetic construct
  source 1..84: mol_type = other DNA
tttttttaagcagtggtatcaacgcagagtacnngctattcgnnaaggcaagnntttttttttttttttttttttttttttttt

SEQ ID NO: 1436 - DNA, 84 bp, synthetic construct
  source 1..84: mol_type = other DNA
tttttttaagcagtggtatcaacgcagagtacnngctattcgnnaatgtcgcnntttttttttttttttttttttttttttttt

SEQ ID NO: 1437 - DNA, 84 bp, synthetic construct
  source 1..84: mol_type = other DNA
tttttttaagcagtggtatcaacgcagagtacnngctattcgnnatggaaccnntttttttttttttttttttttttttttttt

SEQ ID NO: 1438 - DNA, 84 bp, synthetic construct
  source 1..84: mol_type = other DNA
tttttttaagcagtggtatcaacgcagagtacnngctattcgnnagaggcatnntttttttttttttttttttttttttttttt

SEQ ID NO: 1439 - DNA, 84 bp, synthetic construct
  source 1..84: mol_type = other DNA
tttttttaagcagtggtatcaacgcagagtacnngctattcgnntgcatagcnntttttttttttttttttttttttttttttt

SEQ ID NO: 1440 - DNA, 84 bp, synthetic construct
  source 1..84: mol_type = other DNA
tttttttaagcagtggtatcaacgcagagtacnngctattcgnnctaacgganntttttttttttttttttttttttttttttt

SEQ ID NO: 1441 - DNA, 84 bp, synthetic construct
  source 1..84: mol_type = other DNA
tttttttaagcagtggtatcaacgcagagtacnngctattcgnntatcgaggnntttttttttttttttttttttttttttttt

SEQ ID NO: 1442 - DNA, 84 bp, synthetic construct
  source 1..84: mol_type = other DNA
tttttttaagcagtggtatcaacgcagagtacnngctattcgnncatagcctnntttttttttttttttttttttttttttttt

SEQ ID NO: 1443 - DNA, 84 bp, synthetic construct
  source 1..84: mol_type = other DNA
tttttttaagcagtggtatcaacgcagagtacnngctattcgnnatcgagacnntttttttttttttttttttttttttttttt

SEQ ID NO: 1444 - DNA, 84 bp, synthetic construct
  source 1..84: mol_type = other DNA
tttttttaagcagtggtatcaacgcagagtacnngctattcgnnggaagagtnntttttttttttttttttttttttttttttt

SEQ ID NO: 1445 - DNA, 84 bp, synthetic construct
  source 1..84: mol_type = other DNA
tttttttaagcagtggtatcaacgcagagtacnngctattcgnnccaagtagnntttttttttttttttttttttttttttttt

SEQ ID NO: 1446 - DNA, 84 bp, synthetic construct
  source 1..84: mol_type = other DNA
tttttttaagcagtggtatcaacgcagagtacnngctattcgnnctgaacagnntttttttttttttttttttttttttttttt

SEQ ID NO: 1447 - DNA, 84 bp, synthetic construct
  source 1..84: mol_type = other DNA
tttttttaagcagtggtatcaacgcagagtacnngctattcgnngtaggttcnntttttttttttttttttttttttttttttt

SEQ ID NO: 1448 - DNA, 84 bp, synthetic construct
  source 1..84: mol_type = other DNA
tttttttaagcagtggtatcaacgcagagtacnngctattcgnngtatggacnntttttttttttttttttttttttttttttt

SEQ ID NO: 1449 - DNA, 84 bp, synthetic construct
  source 1..84: mol_type = other DNA
tttttttaagcagtggtatcaacgcagagtacnngctattcgnntcgcaacanntttttttttttttttttttttttttttttt

SEQ ID NO: 1450 - DNA, 84 bp, synthetic construct
  source 1..84: mol_type = other DNA
tttttttaagcagtggtatcaacgcagagtacnngctattcgnnccgctaatnntttttttttttttttttttttttttttttt

SEQ ID NO: 1451 - DNA, 84 bp, synthetic construct
  source 1..84: mol_type = other DNA
tttttttaagcagtggtatcaacgcagagtacnngctattcgnngattcgcanntttttttttttttttttttttttttttttt

SEQ ID NO: 1452 - DNA, 84 bp, synthetic construct
  source 1..84: mol_type = other DNA
tttttttaagcagtggtatcaacgcagagtacnngctattcgnncgatggaanntttttttttttttttttttttttttttttt

SEQ ID NO: 1453 - DNA, 84 bp, synthetic construct
  source 1..84: mol_type = other DNA
tttttttaagcagtggtatcaacgcagagtacnngctattcgnnagcaagganntttttttttttttttttttttttttttttt

SEQ ID NO: 1454 - DNA, 84 bp, synthetic construct
  source 1..84: mol_type = other DNA
tttttttaagcagtggtatcaacgcagagtacnngctattcgnncgtagcaanntttttttttttttttttttttttttttttt

SEQ ID NO: 1455 - DNA, 84 bp, synthetic construct
  source 1..84: mol_type = other DNA
tttttttaagcagtggtatcaacgcagagtacnngctattcgnntggcagtanntttttttttttttttttttttttttttttt

SEQ ID NO: 1456 - DNA, 84 bp, synthetic construct
  source 1..84: mol_type = other DNA
tttttttaagcagtggtatcaacgcagagtacnngctattcgnncggtagttnntttttttttttttttttttttttttttttt

SEQ ID NO: 1457 - DNA, 84 bp, synthetic construct
  source 1..84: mol_type = other DNA
tttttttaagcagtggtatcaacgcagagtacnngctattcgnntgacttcgnntttttttttttttttttttttttttttttt

SEQ ID NO: 1458 - DNA, 84 bp, synthetic construct
  source 1..84: mol_type = other DNA
tttttttaagcagtggtatcaacgcagagtacnngctattcgnngagtgcaanntttttttttttttttttttttttttttttt

SEQ ID NO: 1459 - DNA, 84 bp, synthetic construct
  source 1..84: mol_type = other DNA
tttttttaagcagtggtatcaacgcagagtacnngctattcgnnacggtaacnntttttttttttttttttttttttttttttt

SEQ ID NO: 1460 - DNA, 84 bp, synthetic construct
  source 1..84: mol_type = other DNA
tttttttaagcagtggtatcaacgcagagtacnngctattcgnnaagtggtgnntttttttttttttttttttttttttttttt

SEQ ID NO: 1461 - DNA, 84 bp, synthetic construct
  source 1..84: mol_type = other DNA
tttttttaagcagtggtatcaacgcagagtacnngctattcgnnggagacaanntttttttttttttttttttttttttttttt

SEQ ID NO: 1462 - DNA, 84 bp, synthetic construct
  source 1..84: mol_type = other DNA
tttttttaagcagtggtatcaacgcagagtacnngctattcgnntcaaggacnntttttttttttttttttttttttttttttt

SEQ ID NO: 1463 - DNA, 84 bp, synthetic construct
  source 1..84: mol_type = other DNA
tttttttaagcagtggtatcaacgcagagtacnngctattcgnnaagagagcnntttttttttttttttttttttttttttttt

SEQ ID NO: 1464 - DNA, 84 bp, synthetic construct
  source 1..84: mol_type = other DNA
tttttttaagcagtggtatcaacgcagagtacnngctattcgnncgagagatnntttttttttttttttttttttttttttttt

SEQ ID NO: 1465 - DNA, 84 bp, synthetic construct
  source 1..84: mol_type = other DNA
tttttttaagcagtggtatcaacgcagagtacnngctattcgnnacagatggnntttttttttttttttttttttttttttttt

SEQ ID NO: 1466 - DNA, 84 bp, synthetic construct
  source 1..84: mol_type = other DNA
tttttttaagcagtggtatcaacgcagagtacnngctattcgnnaggagtcanntttttttttttttttttttttttttttttt

SEQ ID NO: 1467 - DNA, 84 bp, synthetic construct
  source 1..84: mol_type = other DNA
tttttttaagcagtggtatcaacgcagagtacnngctattcgnncgtgttacnntttttttttttttttttttttttttttttt

SEQ ID NO: 1468 - DNA, 84 bp, synthetic construct
  source 1..84: mol_type = other DNA
tttttttaagcagtggtatcaacgcagagtacnngctattcgnntagtgtgcnntttttttttttttttttttttttttttttt

SEQ ID NO: 1469 - DNA, 84 bp, synthetic construct
  source 1..84: mol_type = other DNA
tttttttaagcagtggtatcaacgcagagtacnngctattcgnnctcatgacnntttttttttttttttttttttttttttttt

SEQ ID NO: 1470 - DNA, 84 bp, synthetic construct
  source 1..84: mol_type = other DNA
tttttttaagcagtggtatcaacgcagagtacnngctattcgnngtatccagnntttttttttttttttttttttttttttttt

SEQ ID NO: 1471 - DNA, 84 bp, synthetic construct
  source 1..84: mol_type = other DNA
tttttttaagcagtggtatcaacgcagagtacnngctattcgnnacgcctatnntttttttttttttttttttttttttttttt

SEQ ID NO: 1472 - DNA, 84 bp, synthetic construct
  source 1..84: mol_type = other DNA
tttttttaagcagtggtatcaacgcagagtacnngctattcgnnaacgacctnntttttttttttttttttttttttttttttt

SEQ ID NO: 1473 - DNA, 84 bp, synthetic construct
  source 1..84: mol_type = other DNA
tttttttaagcagtggtatcaacgcagagtacnngctattcgnnatcaggctnntttttttttttttttttttttttttttttt

SEQ ID NO: 1474 - DNA, 84 bp, synthetic construct
  source 1..84: mol_type = other DNA
tttttttaagcagtggtatcaacgcagagtacnngctattcgnncaagttcgnntttttttttttttttttttttttttttttt

SEQ ID NO: 1475 - DNA, 84 bp, synthetic construct
  source 1..84: mol_type = other DNA
tttttttaagcagtggtatcaacgcagagtacnngctattcgnntagccaganntttttttttttttttttttttttttttttt

SEQ ID NO: 1476 - DNA, 84 bp, synthetic construct
  source 1..84: mol_type = other DNA
tttttttaagcagtggtatcaacgcagagtacnngctattcgnncaatcacgnntttttttttttttttttttttttttttttt

SEQ ID NO: 1477 - DNA, 84 bp, synthetic construct
  source 1..84: mol_type = other DNA
tttttttaagcagtggtatcaacgcagagtacnngctattcgnngcaacaagnntttttttttttttttttttttttttttttt

SEQ ID NO: 1478 - DNA, 84 bp, synthetic construct
  source 1..84: mol_type = other DNA
tttttttaagcagtggtatcaacgcagagtacnngctattcgnncacgacaanntttttttttttttttttttttttttttttt

SEQ ID NO: 1479 - DNA, 84 bp, synthetic construct
  source 1..84: mol_type = other DNA
tttttttaagcagtggtatcaacgcagagtacnngctattcgnntacggaganntttttttttttttttttttttttttttttt

SEQ ID NO: 1480 - DNA, 84 bp, synthetic construct
  source 1..84: mol_type = other DNA
tttttttaagcagtggtatcaacgcagagtacnngctattcgnncgacaaganntttttttttttttttttttttttttttttt

SEQ ID NO: 1481 - DNA, 84 bp, synthetic construct
  source 1..84: mol_type = other DNA
tttttttaagcagtggtatcaacgcagagtacnngctattcgnncgaagtganntttttttttttttttttttttttttttttt

SEQ ID NO: 1482 - DNA, 84 bp, synthetic construct
  source 1..84: mol_type = other DNA
tttttttaagcagtggtatcaacgcagagtacnngctattcgnnagctggtanntttttttttttttttttttttttttttttt

SEQ ID NO: 1483 - DNA, 84 bp, synthetic construct
  source 1..84: mol_type = other DNA
tttttttaagcagtggtatcaacgcagagtacnngctattcgnnaactaggcnntttttttttttttttttttttttttttttt

SEQ ID NO: 1484 - DNA, 84 bp, synthetic construct
  source 1..84: mol_type = other DNA
tttttttaagcagtggtatcaacgcagagtacnngctattcgnncagcaagtnntttttttttttttttttttttttttttttt

SEQ ID NO: 1485 - DNA, 84 bp, synthetic construct
  source 1..84: mol_type = other DNA
tttttttaagcagtggtatcaacgcagagtacnngctattcgnnacgaggtanntttttttttttttttttttttttttttttt

SEQ ID NO: 1486 - DNA, 84 bp, synthetic construct
  source 1..84: mol_type = other DNA
tttttttaagcagtggtatcaacgcagagtacnngctattcgnncatcttccnntttttttttttttttttttttttttttttt

SEQ ID NO: 1487 - DNA, 84 bp, synthetic construct
  source 1..84: mol_type = other DNA
tttttttaagcagtggtatcaacgcagagtacnngctattcgnncctgaatcnntttttttttttttttttttttttttttttt

SEQ ID NO: 1488 - DNA, 84 bp, synthetic construct
  source 1..84: mol_type = other DNA
tttttttaagcagtggtatcaacgcagagtacnngctattcgnntgcagactnntttttttttttttttttttttttttttttt

SEQ ID NO: 1489 - DNA, 84 bp, synthetic construct
  source 1..84: mol_type = other DNA
tttttttaagcagtggtatcaacgcagagtacnngctattcgnnagatgtggnntttttttttttttttttttttttttttttt

SEQ ID NO: 1490 - DNA, 84 bp, synthetic construct
  source 1..84: mol_type = other DNA
tttttttaagcagtggtatcaacgcagagtacnngctattcgnnagttcgacnntttttttttttttttttttttttttttttt

SEQ ID NO: 1491 - DNA, 84 bp, synthetic construct
  source 1..84: mol_type = other DNA
tttttttaagcagtggtatcaacgcagagtacnngctattcgnnacaacctcnntttttttttttttttttttttttttttttt

SEQ ID NO: 1492 - DNA, 84 bp, synthetic construct
  source 1..84: mol_type = other DNA
tttttttaagcagtggtatcaacgcagagtacnngctattcgnncatggtagnntttttttttttttttttttttttttttttt

SEQ ID NO: 1493 - DNA, 84 bp, synthetic construct
  source 1..84: mol_type = other DNA
tttttttaagcagtggtatcaacgcagagtacnngctattcgnncgtatctcnntttttttttttttttttttttttttttttt

SEQ ID NO: 1494 - DNA, 84 bp, synthetic construct
  source 1..84: mol_type = other DNA
tttttttaagcagtggtatcaacgcagagtacnngctattcgnncctagttcnntttttttttttttttttttttttttttttt

SEQ ID NO: 1495 - DNA, 84 bp, synthetic construct
  source 1..84: mol_type = other DNA
tttttttaagcagtggtatcaacgcagagtacnngctattcgnncaagagtcnntttttttttttttttttttttttttttttt

SEQ ID NO: 1496 - DNA, 84 bp, synthetic construct
  source 1..84: mol_type = other DNA
tttttttaagcagtggtatcaacgcagagtacnnagcctaacnnaatcggcanntttttttttttttttttttttttttttttt

SEQ ID NO: 1497 - DNA, 84 bp, synthetic construct
  source 1..84: mol_type = other DNA
tttttttaagcagtggtatcaacgcagagtacnnagcctaacnntacggcatnntttttttttttttttttttttttttttttt

SEQ ID NO: 1498 - DNA, 84 bp, synthetic construct
  source 1..84: mol_type = other DNA
tttttttaagcagtggtatcaacgcagagtacnnagcctaacnnttggatcgnntttttttttttttttttttttttttttttt

SEQ ID NO: 1499 - DNA, 84 bp, synthetic construct
  source 1..84: mol_type = other DNA
tttttttaagcagtggtatcaacgcagagtacnnagcctaacnntggaacganntttttttttttttttttttttttttttttt

SEQ ID NO: 1500 - DNA, 84 bp, synthetic construct
  source 1..84: mol_type = other DNA
tttttttaagcagtggtatcaacgcagagtacnnagcctaacnnggcaatcanntttttttttttttttttttttttttttttt

SEQ ID NO: 1501 - DNA, 84 bp, synthetic construct
  source 1..84: mol_type = other DNA
tttttttaagcagtggtatcaacgcagagtacnnagcctaacnngaatccganntttttttttttttttttttttttttttttt

SEQ ID NO: 1502 - DNA, 84 bp, synthetic construct
  source 1..84: mol_type = other DNA
tttttttaagcagtggtatcaacgcagagtacnnagcctaacnnttacggtgnntttttttttttttttttttttttttttttt

SEQ ID NO: 1503 - DNA, 84 bp, synthetic construct
  source 1..84: mol_type = other DNA
tttttttaagcagtggtatcaacgcagagtacnnagcctaacnncatatcggnntttttttttttttttttttttttttttttt

SEQ ID NO: 1504 - DNA, 84 bp, synthetic construct
  source 1..84: mol_type = other DNA
tttttttaagcagtggtatcaacgcagagtacnnagcctaacnncttcggtanntttttttttttttttttttttttttttttt

SEQ ID NO: 1505 - DNA, 84 bp, synthetic construct
  source 1..84: mol_type = other DNA
tttttttaagcagtggtatcaacgcagagtacnnagcctaacnntcctaacgnntttttttttttttttttttttttttttttt

SEQ ID NO: 1506 - DNA, 84 bp, synthetic construct
  source 1..84: mol_type = other DNA
tttttttaagcagtggtatcaacgcagagtacnnagcctaacnngtaagccanntttttttttttttttttttttttttttttt

SEQ ID NO: 1507 - DNA, 84 bp, synthetic construct
  source 1..84: mol_type = other DNA
tttttttaagcagtggtatcaacgcagagtacnnagcctaacnntaaggtggnntttttttttttttttttttttttttttttt

SEQ ID NO: 1508 - DNA, 84 bp, synthetic construct
  source 1..84: mol_type = other DNA
tttttttaagcagtggtatcaacgcagagtacnnagcctaacnnggtaagctnntttttttttttttttttttttttttttttt

SEQ ID NO: 1509 - DNA, 84 bp, synthetic construct
  source 1..84: mol_type = other DNA
tttttttaagcagtggtatcaacgcagagtacnnagcctaacnntgtgtcganntttttttttttttttttttttttttttttt

SEQ ID NO: 1510 - DNA, 84 bp, synthetic construct
  source 1..84: mol_type = other DNA
tttttttaagcagtggtatcaacgcagagtacnnagcctaacnngagcatganntttttttttttttttttttttttttttttt

SEQ ID NO: 1511 - DNA, 84 bp, synthetic construct
  source 1..84: mol_type = other DNA
tttttttaagcagtggtatcaacgcagagtacnnagcctaacnntcgaagtcnntttttttttttttttttttttttttttttt

SEQ ID NO: 1512 - DNA, 84 bp, synthetic construct
  source 1..84: mol_type = other DNA
tttttttaagcagtggtatcaacgcagagtacnnagcctaacnnggtgaacanntttttttttttttttttttttttttttttt

SEQ ID NO: 1513 - DNA, 84 bp, synthetic construct
  source 1..84: mol_type = other DNA
tttttttaagcagtggtatcaacgcagagtacnnagcctaacnnacatgcacnntttttttttttttttttttttttttttttt

SEQ ID NO: 1514 - DNA, 84 bp, synthetic construct
  source 1..84: mol_type = other DNA
tttttttaagcagtggtatcaacgcagagtacnnagcctaacnnccaacagtnntttttttttttttttttttttttttttttt

SEQ ID NO: 1515 - DNA, 84 bp, synthetic construct
  source 1..84: mol_type = other DNA
tttttttaagcagtggtatcaacgcagagtacnnagcctaacnnagaacagcnntttttttttttttttttttttttttttttt

SEQ ID NO: 1516 - DNA, 84 bp, synthetic construct
  source 1..84: mol_type = other DNA
tttttttaagcagtggtatcaacgcagagtacnnagcctaacnngaacacgtnntttttttttttttttttttttttttttttt

SEQ ID NO: 1517 - DNA, 84 bp, synthetic construct
  source 1..84: mol_type = other DNA
tttttttaagcagtggtatcaacgcagagtacnnagcctaacnnggtcttcanntttttttttttttttttttttttttttttt

SEQ ID NO: 1518 - DNA, 84 bp, synthetic construct
  source 1..84: mol_type = other DNA
tttttttaagcagtggtatcaacgcagagtacnnagcctaacnnaggttcagnntttttttttttttttttttttttttttttt

SEQ ID NO: 1519 - DNA, 84 bp, synthetic construct
  source 1..84: mol_type = other DNA
tttttttaagcagtggtatcaacgcagagtacnnagcctaacnnctagagcanntttttttttttttttttttttttttttttt

SEQ ID NO: 1520 - DNA, 84 bp, synthetic construct
  source 1..84: mol_type = other DNA
tttttttaagcagtggtatcaacgcagagtacnnagcctaacnncttctagcnntttttttttttttttttttttttttttttt

SEQ ID NO: 1521 - DNA, 84 bp, synthetic construct
  source 1..84: mol_type = other DNA
tttttttaagcagtggtatcaacgcagagtacnnagcctaacnngagtaacgnntttttttttttttttttttttttttttttt

SEQ ID NO: 1522 - DNA, 84 bp, synthetic construct
  source 1..84: mol_type = other DNA
tttttttaagcagtggtatcaacgcagagtacnnagcctaacnnctaagaggnntttttttttttttttttttttttttttttt

SEQ ID NO: 1523 - DNA, 84 bp, synthetic construct
  source 1..84: mol_type = other DNA
tttttttaagcagtggtatcaacgcagagtacnnagcctaacnnacgtgtagnntttttttttttttttttttttttttttttt

SEQ ID NO: 1524 - DNA, 84 bp, synthetic construct
  source 1..84: mol_type = other DNA
tttttttaagcagtggtatcaacgcagagtacnnagcctaacnnactacaggnntttttttttttttttttttttttttttttt

SEQ ID NO: 1525 - DNA, 84 bp, synthetic construct
  source 1..84: mol_type = other DNA
tttttttaagcagtggtatcaacgcagagtacnnagcctaacnntacaggtcnntttttttttttttttttttttttttttttt

SEQ ID NO: 1526 - DNA, 84 bp, synthetic construct
  source 1..84: mol_type = other DNA
tttttttaagcagtggtatcaacgcagagtacnnagcctaacnnctcacatgnntttttttttttttttttttttttttttttt

SEQ ID NO: 1527 - DNA, 84 bp, synthetic construct
  source 1..84: mol_type = other DNA
tttttttaagcagtggtatcaacgcagagtacnnagcctaacnnactaggagnntttttttttttttttttttttttttttttt

SEQ ID NO: 1528 - DNA, 84 bp, synthetic construct
  source 1..84: mol_type = other DNA
tttttttaagcagtggtatcaacgcagagtacnnagcctaacnnccatagganntttttttttttttttttttttttttttttt

SEQ ID NO: 1529 - DNA, 84 bp, synthetic construct
  source 1..84: mol_type = other DNA
tttttttaagcagtggtatcaacgcagagtacnnagcctaacnnggagaatcnntttttttttttttttttttttttttttttt

SEQ ID NO: 1530 - DNA, 84 bp, synthetic construct
  source 1..84: mol_type = other DNA
tttttttaagcagtggtatcaacgcagagtacnnagcctaacnngccaagaanntttttttttttttttttttttttttttttt

SEQ ID NO: 1531 - DNA, 84 bp, synthetic construct
  source 1..84: mol_type = other DNA
tttttttaagcagtggtatcaacgcagagtacnnagcctaacnnaaggcaagnntttttttttttttttttttttttttttttt

SEQ ID NO: 1532 - DNA, 84 bp, synthetic construct
  source 1..84: mol_type = other DNA
tttttttaagcagtggtatcaacgcagagtacnnagcctaacnnaatgtcgcnntttttttttttttttttttttttttttttt

SEQ ID NO: 1533 - DNA, 84 bp, synthetic construct
  source 1..84: mol_type = other DNA
tttttttaagcagtggtatcaacgcagagtacnnagcctaacnnatggaaccnntttttttttttttttttttttttttttttt

SEQ ID NO: 1534 - DNA, 84 bp, synthetic construct
  source 1..84: mol_type = other DNA
tttttttaagcagtggtatcaacgcagagtacnnagcctaacnnagaggcatnntttttttttttttttttttttttttttttt

SEQ ID NO: 1535 - DNA, 84 bp, synthetic construct
  source 1..84: mol_type = other DNA
tttttttaagcagtggtatcaacgcagagtacnnagcctaacnntgcatagcnntttttttttttttttttttttttttttttt

SEQ ID NO: 1536 - DNA, 84 bp, synthetic construct
  source 1..84: mol_type = other DNA
tttttttaagcagtggtatcaacgcagagtacnnagcctaacnnctaacgganntttttttttttttttttttttttttttttt

SEQ ID NO: 1537 - DNA, 84 bp, synthetic construct
  source 1..84: mol_type = other DNA
tttttttaagcagtggtatcaacgcagagtacnnagcctaacnntatcgaggnntttttttttttttttttttttttttttttt

SEQ ID NO: 1538 - DNA, 84 bp, synthetic construct
  source 1..84: mol_type = other DNA
tttttttaagcagtggtatcaacgcagagtacnnagcctaacnncatagcctnntttttttttttttttttttttttttttttt

SEQ ID NO: 1539 - DNA, 84 bp, synthetic construct
  source 1..84: mol_type = other DNA
tttttttaagcagtggtatcaacgcagagtacnnagcctaacnnatcgagacnntttttttttttttttttttttttttttttt

SEQ ID NO: 1540 - DNA, 84 bp, synthetic construct
  source 1..84: mol_type = other DNA
tttttttaagcagtggtatcaacgcagagtacnnagcctaacnnggaagagtnntttttttttttttttttttttttttttttt

SEQ ID NO: 1541 - DNA, 84 bp, synthetic construct
  source 1..84: mol_type = other DNA
tttttttaagcagtggtatcaacgcagagtacnnagcctaacnnccaagtagnntttttttttttttttttttttttttttttt

SEQ ID NO: 1542 - DNA, 84 bp, synthetic construct
  source 1..84: mol_type = other DNA
tttttttaagcagtggtatcaacgcagagtacnnagcctaacnnctgaacagnntttttttttttttttttttttttttttttt

SEQ ID NO: 1543 - DNA, 84 bp, synthetic construct
  source 1..84: mol_type = other DNA
tttttttaagcagtggtatcaacgcagagtacnnagcctaacnngtaggttcnntttttttttttttttttttttttttttttt

SEQ ID NO: 1544 - DNA, 84 bp, synthetic construct
  source 1..84: mol_type = other DNA
tttttttaagcagtggtatcaacgcagagtacnnagcctaacnngtatggacnntttttttttttttttttttttttttttttt

SEQ ID NO: 1545 - DNA, 84 bp, synthetic construct
  source 1..84: mol_type = other DNA
tttttttaagcagtggtatcaacgcagagtacnnagcctaacnntcgcaacanntttttttttttttttttttttttttttttt

SEQ ID NO: 1546 - DNA, 84 bp, synthetic construct
  source 1..84: mol_type = other DNA
tttttttaagcagtggtatcaacgcagagtacnnagcctaacnnccgctaatnntttttttttttttttttttttttttttttt

SEQ ID NO: 1547 - DNA, 84 bp, synthetic construct
  source 1..84: mol_type = other DNA
tttttttaagcagtggtatcaacgcagagtacnnagcctaacnngattcgcanntttttttttttttttttttttttttttttt

SEQ ID NO: 1548 - DNA, 84 bp, synthetic construct
  source 1..84: mol_type = other DNA
tttttttaagcagtggtatcaacgcagagtacnnagcctaacnncgatggaanntttttttttttttttttttttttttttttt

SEQ ID NO: 1549 - DNA, 84 bp, synthetic construct
  source 1..84: mol_type = other DNA
tttttttaagcagtggtatcaacgcagagtacnnagcctaacnnagcaagganntttttttttttttttttttttttttttttt

SEQ ID NO: 1550 - DNA, 84 bp, synthetic construct
  source 1..84: mol_type = other DNA
tttttttaagcagtggtatcaacgcagagtacnnagcctaacnncgtagcaanntttttttttttttttttttttttttttttt

SEQ ID NO: 1551 - DNA, 84 bp, synthetic construct
  source 1..84: mol_type = other DNA
tttttttaagcagtggtatcaacgcagagtacnnagcctaacnntggcagtanntttttttttttttttttttttttttttttt

SEQ ID NO: 1552 - DNA, 84 bp, synthetic construct
  source 1..84: mol_type = other DNA
tttttttaagcagtggtatcaacgcagagtacnnagcctaacnncggtagttnntttttttttttttttttttttttttttttt

SEQ ID NO: 1553 - DNA, 84 bp, synthetic construct
  source 1..84: mol_type = other DNA
tttttttaagcagtggtatcaacgcagagtacnnagcctaacnntgacttcgnntttttttttttttttttttttttttttttt

SEQ ID NO: 1554 - DNA, 84 bp, synthetic construct
  source 1..84: mol_type = other DNA
tttttttaagcagtggtatcaacgcagagtacnnagcctaacnngagtgcaanntttttttttttttttttttttttttttttt

SEQ ID NO: 1555 - DNA, 84 bp, synthetic construct
  source 1..84: mol_type = other DNA
tttttttaagcagtggtatcaacgcagagtacnnagcctaacnnacggtaacnntttttttttttttttttttttttttttttt

SEQ ID NO: 1556 - DNA, 84 bp, synthetic construct
  source 1..84: mol_type = other DNA
tttttttaagcagtggtatcaacgcagagtacnnagcctaacnnaagtggtgnntttttttttttttttttttttttttttttt

SEQ ID NO: 1557 - DNA, 84 bp, synthetic construct
  source 1..84: mol_type = other DNA
tttttttaagcagtggtatcaacgcagagtacnnagcctaacnnggagacaanntttttttttttttttttttttttttttttt

SEQ ID NO: 1558 - DNA, 84 bp, synthetic construct
  source 1..84: mol_type = other DNA
tttttttaagcagtggtatcaacgcagagtacnnagcctaacnntcaaggacnntttttttttttttttttttttttttttttt

SEQ ID NO: 1559 - DNA, 84 bp, synthetic construct
  source 1..84: mol_type = other DNA
tttttttaagcagtggtatcaacgcagagtacnnagcctaacnnaagagagcnntttttttttttttttttttttttttttttt

SEQ ID NO: 1560 - DNA, 84 bp, synthetic construct
  source 1..84: mol_type = other DNA
tttttttaagcagtggtatcaacgcagagtacnnagcctaacnncgagagatnntttttttttttttttttttttttttttttt

SEQ ID NO: 1561 - DNA, 84 bp, synthetic construct
  source 1..84: mol_type = other DNA
tttttttaagcagtggtatcaacgcagagtacnnagcctaacnnacagatggnntttttttttttttttttttttttttttttt

SEQ ID NO: 1562 - DNA, 84 bp, synthetic construct
  source 1..84: mol_type = other DNA
tttttttaagcagtggtatcaacgcagagtacnnagcctaacnnaggagtcanntttttttttttttttttttttttttttttt

SEQ ID NO: 1563 - DNA, 84 bp, synthetic construct
  source 1..84: mol_type = other DNA
tttttttaagcagtggtatcaacgcagagtacnnagcctaacnncgtgttacnntttttttttttttttttttttttttttttt

SEQ ID NO: 1564 - DNA, 84 bp, synthetic construct
  source 1..84: mol_type = other DNA
tttttttaagcagtggtatcaacgcagagtacnnagcctaacnntagtgtgcnntttttttttttttttttttttttttttttt

SEQ ID NO: 1565 - DNA, 84 bp, synthetic construct
  source 1..84: mol_type = other DNA
tttttttaagcagtggtatcaacgcagagtacnnagcctaacnnctcatgacnntttttttttttttttttttttttttttttt

SEQ ID NO: 1566 - DNA, 84 bp, synthetic construct
  source 1..84: mol_type = other DNA
tttttttaagcagtggtatcaacgcagagtacnnagcctaacnngtatccagnntttttttttttttttttttttttttttttt

SEQ ID NO: 1567 - DNA, 84 bp, synthetic construct
  source 1..84: mol_type = other DNA
tttttttaagcagtggtatcaacgcagagtacnnagcctaacnnacgcctatnntttttttttttttttttttttttttttttt

SEQ ID NO: 1568 - DNA, 84 bp, synthetic construct
  source 1..84: mol_type = other DNA
tttttttaagcagtggtatcaacgcagagtacnnagcctaacnnaacgacctnntttttttttttttttttttttttttttttt

SEQ ID NO: 1569 - DNA, 84 bp, synthetic construct
  source 1..84: mol_type = other DNA
tttttttaagcagtggtatcaacgcagagtacnnagcctaacnnatcaggctnntttttttttttttttttttttttttttttt

SEQ ID NO: 1570 - DNA, 84 bp, synthetic construct
  source 1..84: mol_type = other DNA
tttttttaagcagtggtatcaacgcagagtacnnagcctaacnncaagttcgnntttttttttttttttttttttttttttttt

SEQ ID NO: 1571 - DNA, 84 bp, synthetic construct
  source 1..84: mol_type = other DNA
tttttttaagcagtggtatcaacgcagagtacnnagcctaacnntagccaganntttttttttttttttttttttttttttttt

SEQ ID NO: 1572 - DNA, 84 bp, synthetic construct
  source 1..84: mol_type = other DNA
tttttttaagcagtggtatcaacgcagagtacnnagcctaacnncaatcacgnntttttttttttttttttttttttttttttt

SEQ ID NO: 1573 - DNA, 84 bp, synthetic construct
  source 1..84: mol_type = other DNA
tttttttaagcagtggtatcaacgcagagtacnnagcctaacnngcaacaagnntttttttttttttttttttttttttttttt

SEQ ID NO: 1574 - DNA, 84 bp, synthetic construct
  source 1..84: mol_type = other DNA
tttttttaagcagtggtatcaacgcagagtacnnagcctaacnncacgacaanntttttttttttttttttttttttttttttt

SEQ ID NO: 1575 - DNA, 84 bp, synthetic construct
  source 1..84: mol_type = other DNA
tttttttaagcagtggtatcaacgcagagtacnnagcctaacnntacggaganntttttttttttttttttttttttttttttt

SEQ ID NO: 1576 - DNA, 84 bp, synthetic construct
  source 1..84: mol_type = other DNA
tttttttaagcagtggtatcaacgcagagtacnnagcctaacnncgacaaganntttttttttttttttttttttttttttttt

SEQ ID NO: 1577 - DNA, 84 bp, synthetic construct
  source 1..84: mol_type = other DNA
tttttttaagcagtggtatcaacgcagagtacnnagcctaacnncgaagtganntttttttttttttttttttttttttttttt

SEQ ID NO: 1578 - DNA, 84 bp, synthetic construct
  source 1..84: mol_type = other DNA
tttttttaagcagtggtatcaacgcagagtacnnagcctaacnnagctggtanntttttttttttttttttttttttttttttt

SEQ ID NO: 1579 - DNA, 84 bp, synthetic construct
  source 1..84: mol_type = other DNA
tttttttaagcagtggtatcaacgcagagtacnnagcctaacnnaactaggcnntttttttttttttttttttttttttttttt

SEQ ID NO: 1580 - DNA, 84 bp, synthetic construct
  source 1..84: mol_type = other DNA
tttttttaagcagtggtatcaacgcagagtacnnagcctaacnncagcaagtnntttttttttttttttttttttttttttttt

SEQ ID NO: 1581 - DNA, 84 bp, synthetic construct
  source 1..84: mol_type = other DNA
tttttttaagcagtggtatcaacgcagagtacnnagcctaacnnacgaggtanntttttttttttttttttttttttttttttt

SEQ ID NO: 1582 - DNA, 84 bp, synthetic construct
  source 1..84: mol_type = other DNA
tttttttaagcagtggtatcaacgcagagtacnnagcctaacnncatcttccnntttttttttttttttttttttttttttttt

SEQ ID NO: 1583 - DNA, 84 bp, synthetic construct
  source 1..84: mol_type = other DNA
tttttttaagcagtggtatcaacgcagagtacnnagcctaacnncctgaatcnntttttttttttttttttttttttttttttt

SEQ ID NO: 1584 - DNA, 84 bp, synthetic construct
  source 1..84: mol_type = other DNA
tttttttaagcagtggtatcaacgcagagtacnnagcctaacnntgcagactnntttttttttttttttttttttttttttttt

SEQ ID NO: 1585 - DNA, 84 bp, synthetic construct
  source 1..84: mol_type = other DNA
tttttttaagcagtggtatcaacgcagagtacnnagcctaacnnagatgtggnntttttttttttttttttttttttttttttt

SEQ ID NO: 1586 - DNA, 84 bp, synthetic construct
  source 1..84: mol_type = other DNA
tttttttaagcagtggtatcaacgcagagtacnnagcctaacnnagttcgacnntttttttttttttttttttttttttttttt

SEQ ID NO: 1587 - DNA, 84 bp, synthetic construct
  source 1..84: mol_type = other DNA
tttttttaagcagtggtatcaacgcagagtacnnagcctaacnnacaacctcnntttttttttttttttttttttttttttttt

SEQ ID NO: 1588 - DNA, 84 bp, synthetic construct
  source 1..84: mol_type = other DNA
tttttttaagcagtggtatcaacgcagagtacnnagcctaacnncatggtagnntttttttttttttttttttttttttttttt

SEQ ID NO: 1589 - DNA, 84 bp, synthetic construct
  source 1..84: mol_type = other DNA
tttttttaagcagtggtatcaacgcagagtacnnagcctaacnncgtatctcnntttttttttttttttttttttttttttttt

SEQ ID NO: 1590 - DNA, 84 bp, synthetic construct
  source 1..84: mol_type = other DNA
tttttttaagcagtggtatcaacgcagagtacnnagcctaacnncctagttcnntttttttttttttttttttttttttttttt

SEQ ID NO: 1591 - DNA, 84 bp, synthetic construct
  source 1..84: mol_type = other DNA
tttttttaagcagtggtatcaacgcagagtacnnagcctaacnncaagagtcnntttttttttttttttttttttttttttttt

SEQ ID NO: 1592 - DNA, 84 bp, synthetic construct
  source 1..84: mol_type = other DNA
tttttttaagcagtggtatcaacgcagagtacnngcctatctnnaatcggcanntttttttttttttttttttttttttttttt

SEQ ID NO: 1593 - DNA, 84 bp, synthetic construct
  source 1..84: mol_type = other DNA
tttttttaagcagtggtatcaacgcagagtacnngcctatctnntacggcatnntttttttttttttttttttttttttttttt

SEQ ID NO: 1594 - DNA, 84 bp, synthetic construct
  source 1..84: mol_type = other DNA
tttttttaagcagtggtatcaacgcagagtacnngcctatctnnttggatcgnntttttttttttttttttttttttttttttt

SEQ ID NO: 1595 - DNA, 84 bp, synthetic construct
  source 1..84: mol_type = other DNA
tttttttaagcagtggtatcaacgcagagtacnngcctatctnntggaacganntttttttttttttttttttttttttttttt

SEQ ID NO: 1596 - DNA, 84 bp, synthetic construct
  source 1..84: mol_type = other DNA
tttttttaagcagtggtatcaacgcagagtacnngcctatctnnggcaatcanntttttttttttttttttttttttttttttt

SEQ ID NO: 1597 - DNA, 84 bp, synthetic construct
  source 1..84: mol_type = other DNA
tttttttaagcagtggtatcaacgcagagtacnngcctatctnngaatccganntttttttttttttttttttttttttttttt

SEQ ID NO: 1598 - DNA, 84 bp, synthetic construct
  source 1..84: mol_type = other DNA
tttttttaagcagtggtatcaacgcagagtacnngcctatctnnttacggtgnntttttttttttttttttttttttttttttt

SEQ ID NO: 1599 - DNA, 84 bp, synthetic construct
  source 1..84: mol_type = other DNA
tttttttaagcagtggtatcaacgcagagtacnngcctatctnncatatcggnntttttttttttttttttttttttttttttt

SEQ ID NO: 1600 - DNA, 84 bp, synthetic construct
  source 1..84: mol_type = other DNA
tttttttaagcagtggtatcaacgcagagtacnngcctatctnncttcggtanntttttttttttttttttttttttttttttt

SEQ ID NO: 1601 - DNA, 84 bp, synthetic construct
  source 1..84: mol_type = other DNA
tttttttaagcagtggtatcaacgcagagtacnngcctatctnntcctaacgnntttttttttttttttttttttttttttttt

SEQ ID NO: 1602 - DNA, 84 bp, synthetic construct
  source 1..84: mol_type = other DNA
tttttttaagcagtggtatcaacgcagagtacnngcctatctnngtaagccanntttttttttttttttttttttttttttttt

SEQ ID NO: 1603 - DNA, 84 bp, synthetic construct
  source 1..84: mol_type = other DNA
tttttttaagcagtggtatcaacgcagagtacnngcctatctnntaaggtggnntttttttttttttttttttttttttttttt

SEQ ID NO: 1604 - DNA, 84 bp, synthetic construct
  source 1..84: mol_type = other DNA
tttttttaagcagtggtatcaacgcagagtacnngcctatctnnggtaagctnntttttttttttttttttttttttttttttt

SEQ ID NO: 1605 - DNA, 84 bp, synthetic construct
  source 1..84: mol_type = other DNA
tttttttaagcagtggtatcaacgcagagtacnngcctatctnntgtgtcganntttttttttttttttttttttttttttttt

SEQ ID NO: 1606 - DNA, 84 bp, synthetic construct
  source 1..84: mol_type = other DNA
tttttttaagcagtggtatcaacgcagagtacnngcctatctnngagcatganntttttttttttttttttttttttttttttt

SEQ ID NO: 1607 - DNA, 84 bp, synthetic construct
  source 1..84: mol_type = other DNA
tttttttaagcagtggtatcaacgcagagtacnngcctatctnntcgaagtcnntttttttttttttttttttttttttttttt

SEQ ID NO: 1608 - DNA, 84 bp, synthetic construct
  source 1..84: mol_type = other DNA
tttttttaagcagtggtatcaacgcagagtacnngcctatctnnggtgaacanntttttttttttttttttttttttttttttt

SEQ ID NO: 1609 - DNA, 84 bp, synthetic construct
  source 1..84: mol_type = other DNA
tttttttaagcagtggtatcaacgcagagtacnngcctatctnnacatgcacnntttttttttttttttttttttttttttttt

SEQ ID NO: 1610 - DNA, 84 bp, synthetic construct
  source 1..84: mol_type = other DNA
tttttttaagcagtggtatcaacgcagagtacnngcctatctnnccaacagtnntttttttttttttttttttttttttttttt

SEQ ID NO: 1611 - DNA, 84 bp, synthetic construct
  source 1..84: mol_type = other DNA
tttttttaagcagtggtatcaacgcagagtacnngcctatctnnagaacagcnntttttttttttttttttttttttttttttt

SEQ ID NO: 1612 - DNA, 84 bp, synthetic construct
  source 1..84: mol_type = other DNA
tttttttaagcagtggtatcaacgcagagtacnngcctatctnngaacacgtnntttttttttttttttttttttttttttttt

SEQ ID NO: 1613 - DNA, 84 bp, synthetic construct
  source 1..84: mol_type = other DNA
tttttttaagcagtggtatcaacgcagagtacnngcctatctnnggtcttcanntttttttttttttttttttttttttttttt

SEQ ID NO: 1614 - DNA, 84 bp, synthetic construct
  source 1..84: mol_type = other DNA
tttttttaagcagtggtatcaacgcagagtacnngcctatctnnaggttcagnntttttttttttttttttttttttttttttt

SEQ ID NO: 1615 - DNA, 84 bp, synthetic construct
  source 1..84: mol_type = other DNA
tttttttaagcagtggtatcaacgcagagtacnngcctatctnnctagagcanntttttttttttttttttttttttttttttt

SEQ ID NO: 1616 - DNA, 84 bp, synthetic construct
  source 1..84: mol_type = other DNA
tttttttaagcagtggtatcaacgcagagtacnngcctatctnncttctagcnntttttttttttttttttttttttttttttt

SEQ ID NO: 1617 - DNA, 84 bp, synthetic construct
  source 1..84: mol_type = other DNA
tttttttaagcagtggtatcaacgcagagtacnngcctatctnngagtaacgnntttttttttttttttttttttttttttttt

SEQ ID NO: 1618 - DNA, 84 bp, synthetic construct
  source 1..84: mol_type = other DNA
tttttttaagcagtggtatcaacgcagagtacnngcctatctnnctaagaggnntttttttttttttttttttttttttttttt

SEQ ID NO: 1619 - DNA, 84 bp, synthetic construct
  source 1..84: mol_type = other DNA
tttttttaagcagtggtatcaacgcagagtacnngcctatctnnacgtgtagnntttttttttttttttttttttttttttttt

SEQ ID NO: 1620 - DNA, 84 bp, synthetic construct
  source 1..84: mol_type = other DNA
tttttttaagcagtggtatcaacgcagagtacnngcctatctnnactacaggnntttttttttttttttttttttttttttttt

SEQ ID NO: 1621 - DNA, 84 bp, synthetic construct
  source 1..84: mol_type = other DNA
tttttttaagcagtggtatcaacgcagagtacnngcctatctnntacaggtcnntttttttttttttttttttttttttttttt

SEQ ID NO: 1622 - DNA, 84 bp, synthetic construct
  source 1..84: mol_type = other DNA
tttttttaagcagtggtatcaacgcagagtacnngcctatctnnctcacatgnntttttttttttttttttttttttttttttt

SEQ ID NO: 1623 - DNA, 84 bp, synthetic construct
  source 1..84: mol_type = other DNA
tttttttaagcagtggtatcaacgcagagtacnngcctatctnnactaggagnntttttttttttttttttttttttttttttt

SEQ ID NO: 1624 - DNA, 84 bp, synthetic construct
  source 1..84: mol_type = other DNA
tttttttaagcagtggtatcaacgcagagtacnngcctatctnnccatagganntttttttttttttttttttttttttttttt

SEQ ID NO: 1625 - DNA, 84 bp, synthetic construct
  source 1..84: mol_type = other DNA
tttttttaagcagtggtatcaacgcagagtacnngcctatctnnggagaatcnntttttttttttttttttttttttttttttt

SEQ ID NO: 1626 - DNA, 84 bp, synthetic construct
  source 1..84: mol_type = other DNA
tttttttaagcagtggtatcaacgcagagtacnngcctatctnngccaagaanntttttttttttttttttttttttttttttt

SEQ ID NO: 1627 - DNA, 84 bp, synthetic construct
  source 1..84: mol_type = other DNA
tttttttaagcagtggtatcaacgcagagtacnngcctatctnnaaggcaagnntttttttttttttttttttttttttttttt

SEQ ID NO: 1628 - DNA, 84 bp, synthetic construct
  source 1..84: mol_type = other DNA
tttttttaagcagtggtatcaacgcagagtacnngcctatctnnaatgtcgcnntttttttttttttttttttttttttttttt

SEQ ID NO: 1629 - DNA, 84 bp, synthetic construct
  source 1..84: mol_type = other DNA
tttttttaagcagtggtatcaacgcagagtacnngcctatctnnatggaaccnntttttttttttttttttttttttttttttt

SEQ ID NO: 1630 - DNA, 84 bp, synthetic construct
  source 1..84: mol_type = other DNA
tttttttaagcagtggtatcaacgcagagtacnngcctatctnnagaggcatnntttttttttttttttttttttttttttttt

SEQ ID NO: 1631 - DNA, 84 bp, synthetic construct
  source 1..84: mol_type = other DNA
tttttttaagcagtggtatcaacgcagagtacnngcctatctnntgcatagcnntttttttttttttttttttttttttttttt

SEQ ID NO: 1632 - DNA, 84 bp, synthetic construct
  source 1..84: mol_type = other DNA
tttttttaagcagtggtatcaacgcagagtacnngcctatctnnctaacgganntttttttttttttttttttttttttttttt

SEQ ID NO: 1633 - DNA, 84 bp, synthetic construct
  source 1..84: mol_type = other DNA
tttttttaagcagtggtatcaacgcagagtacnngcctatctnntatcgaggnntttttttttttttttttttttttttttttt

SEQ ID NO: 1634 - DNA, 84 bp, synthetic construct
  source 1..84: mol_type = other DNA
tttttttaagcagtggtatcaacgcagagtacnngcctatctnncatagcctnntttttttttttttttttttttttttttttt

SEQ ID NO: 1635 - DNA, 84 bp, synthetic construct
  source 1..84: mol_type = other DNA
tttttttaagcagtggtatcaacgcagagtacnngcctatctnnatcgagacnntttttttttttttttttttttttttttttt

SEQ ID NO: 1636 - DNA, 84 bp, synthetic construct
  source 1..84: mol_type = other DNA
tttttttaagcagtggtatcaacgcagagtacnngcctatctnnggaagagtnntttttttttttttttttttttttttttttt

SEQ ID NO: 1637 - DNA, 84 bp, synthetic construct
  source 1..84: mol_type = other DNA
tttttttaagcagtggtatcaacgcagagtacnngcctatctnnccaagtagnntttttttttttttttttttttttttttttt

SEQ ID NO: 1638 - DNA, 84 bp, synthetic construct
  source 1..84: mol_type = other DNA
tttttttaagcagtggtatcaacgcagagtacnngcctatctnnctgaacagnntttttttttttttttttttttttttttttt

SEQ ID NO: 1639 - DNA, 84 bp, synthetic construct
  source 1..84: mol_type = other DNA
tttttttaagcagtggtatcaacgcagagtacnngcctatctnngtaggttcnntttttttttttttttttttttttttttttt

SEQ ID NO: 1640 - DNA, 84 bp, synthetic construct
  source 1..84: mol_type = other DNA
tttttttaagcagtggtatcaacgcagagtacnngcctatctnngtatggacnntttttttttttttttttttttttttttttt

SEQ ID NO: 1641 - DNA, 84 bp, synthetic construct
  source 1..84: mol_type = other DNA
tttttttaagcagtggtatcaacgcagagtacnngcctatctnntcgcaacanntttttttttttttttttttttttttttttt

SEQ ID NO: 1642 - DNA, 84 bp, synthetic construct
  source 1..84: mol_type = other DNA
tttttttaagcagtggtatcaacgcagagtacnngcctatctnnccgctaatnntttttttttttttttttttttttttttttt

SEQ ID NO: 1643 - DNA, 84 bp, synthetic construct
  source 1..84: mol_type = other DNA
tttttttaagcagtggtatcaacgcagagtacnngcctatctnngattcgcanntttttttttttttttttttttttttttttt

SEQ ID NO: 1644 - DNA, 84 bp, synthetic construct
  source 1..84: mol_type = other DNA
tttttttaagcagtggtatcaacgcagagtacnngcctatctnncgatggaanntttttttttttttttttttttttttttttt

SEQ ID NO: 1645 - DNA, 84 bp, synthetic construct
  source 1..84: mol_type = other DNA
tttttttaagcagtggtatcaacgcagagtacnngcctatctnnagcaagganntttttttttttttttttttttttttttttt

SEQ ID NO: 1646 - DNA, 84 bp, synthetic construct
  source 1..84: mol_type = other DNA
tttttttaagcagtggtatcaacgcagagtacnngcctatctnncgtagcaanntttttttttttttttttttttttttttttt

SEQ ID NO: 1647 - DNA, 84 bp, synthetic construct
  source 1..84: mol_type = other DNA
tttttttaagcagtggtatcaacgcagagtacnngcctatctnntggcagtanntttttttttttttttttttttttttttttt

SEQ ID NO: 1648 - DNA, 84 bp, synthetic construct
  source 1..84: mol_type = other DNA
tttttttaagcagtggtatcaacgcagagtacnngcctatctnncggtagttnntttttttttttttttttttttttttttttt

SEQ ID NO: 1649 - DNA, 84 bp, synthetic construct
  source 1..84: mol_type = other DNA
tttttttaagcagtggtatcaacgcagagtacnngcctatctnntgacttcgnntttttttttttttttttttttttttttttt

SEQ ID NO: 1650 - DNA, 84 bp, synthetic construct
  source 1..84: mol_type = other DNA
tttttttaagcagtggtatcaacgcagagtacnngcctatctnngagtgcaanntttttttttttttttttttttttttttttt

SEQ ID NO: 1651 - DNA, 84 bp, synthetic construct
  source 1..84: mol_type = other DNA
tttttttaagcagtggtatcaacgcagagtacnngcctatctnnacggtaacnntttttttttttttttttttttttttttttt

SEQ ID NO: 1652 - DNA, 84 bp, synthetic construct
  source 1..84: mol_type = other DNA
tttttttaagcagtggtatcaacgcagagtacnngcctatctnnaagtggtgnntttttttttttttttttttttttttttttt

SEQ ID NO: 1653 - DNA, 84 bp, synthetic construct
  source 1..84: mol_type = other DNA
tttttttaagcagtggtatcaacgcagagtacnngcctatctnnggagacaanntttttttttttttttttttttttttttttt

SEQ ID NO: 1654 - DNA, 84 bp, synthetic construct
  source 1..84: mol_type = other DNA
tttttttaagcagtggtatcaacgcagagtacnngcctatctnntcaaggacnntttttttttttttttttttttttttttttt

SEQ ID NO: 1655 - DNA, 84 bp, synthetic construct
  source 1..84: mol_type = other DNA
tttttttaagcagtggtatcaacgcagagtacnngcctatctnnaagagagcnntttttttttttttttttttttttttttttt

SEQ ID NO: 1656 - DNA, 84 bp, synthetic construct
  source 1..84: mol_type = other DNA
tttttttaagcagtggtatcaacgcagagtacnngcctatctnncgagagatnntttttttttttttttttttttttttttttt

SEQ ID NO: 1657 - DNA, 84 bp, synthetic construct
  source 1..84: mol_type = other DNA
tttttttaagcagtggtatcaacgcagagtacnngcctatctnnacagatggnntttttttttttttttttttttttttttttt

SEQ ID NO: 1658 - DNA, 84 bp, synthetic construct
  source 1..84: mol_type = other DNA
tttttttaagcagtggtatcaacgcagagtacnngcctatctnnaggagtcanntttttttttttttttttttttttttttttt

SEQ ID NO: 1659 - DNA, 84 bp, synthetic construct
  source 1..84: mol_type = other DNA
tttttttaagcagtggtatcaacgcagagtacnngcctatctnncgtgttacnntttttttttttttttttttttttttttttt

SEQ ID NO: 1660 - DNA, 84 bp, synthetic construct
  source 1..84: mol_type = other DNA
tttttttaagcagtggtatcaacgcagagtacnngcctatctnntagtgtgcnntttttttttttttttttttttttttttttt

SEQ ID NO: 1661 - DNA, 84 bp, synthetic construct
  source 1..84: mol_type = other DNA
tttttttaagcagtggtatcaacgcagagtacnngcctatctnnctcatgacnntttttttttttttttttttttttttttttt

SEQ ID NO: 1662 - DNA, 84 bp, synthetic construct
  source 1..84: mol_type = other DNA
tttttttaagcagtggtatcaacgcagagtacnngcctatctnngtatccagnntttttttttttttttttttttttttttttt

SEQ ID NO: 1663 - DNA, 84 bp, synthetic construct
  source 1..84: mol_type = other DNA
tttttttaagcagtggtatcaacgcagagtacnngcctatctnnacgcctatnntttttttttttttttttttttttttttttt

SEQ ID NO: 1664 - DNA, 84 bp, synthetic construct
  source 1..84: mol_type = other DNA
tttttttaagcagtggtatcaacgcagagtacnngcctatctnnaacgacctnntttttttttttttttttttttttttttttt

SEQ ID NO: 1665 - DNA, 84 bp, synthetic construct
  source 1..84: mol_type = other DNA
tttttttaagcagtggtatcaacgcagagtacnngcctatctnnatcaggctnntttttttttttttttttttttttttttttt

SEQ ID NO: 1666 - DNA, 84 bp, synthetic construct
  source 1..84: mol_type = other DNA
tttttttaagcagtggtatcaacgcagagtacnngcctatctnncaagttcgnntttttttttttttttttttttttttttttt

SEQ ID NO: 1667 - DNA, 84 bp, synthetic construct
  source 1..84: mol_type = other DNA
tttttttaagcagtggtatcaacgcagagtacnngcctatctnntagccaganntttttttttttttttttttttttttttttt

SEQ ID NO: 1668 - DNA, 84 bp, synthetic construct
  source 1..84: mol_type = other DNA
tttttttaagcagtggtatcaacgcagagtacnngcctatctnncaatcacgnntttttttttttttttttttttttttttttt

SEQ ID NO: 1669 - DNA, 84 bp, synthetic construct
  source 1..84: mol_type = other DNA
tttttttaagcagtggtatcaacgcagagtacnngcctatctnngcaacaagnntttttttttttttttttttttttttttttt

SEQ ID NO: 1670 - DNA, 84 bp, synthetic construct
  source 1..84: mol_type = other DNA
tttttttaagcagtggtatcaacgcagagtacnngcctatctnncacgacaanntttttttttttttttttttttttttttttt

SEQ ID NO: 1671 - DNA, 84 bp, synthetic construct
  source 1..84: mol_type = other DNA
tttttttaagcagtggtatcaacgcagagtacnngcctatctnntacggaganntttttttttttttttttttttttttttttt

SEQ ID NO: 1672 - DNA, 84 bp, synthetic construct
  source 1..84: mol_type = other DNA
tttttttaagcagtggtatcaacgcagagtacnngcctatctnncgacaaganntttttttttttttttttttttttttttttt

SEQ ID NO: 1673 - DNA, 84 bp, synthetic construct
  source 1..84: mol_type = other DNA
tttttttaagcagtggtatcaacgcagagtacnngcctatctnncgaagtganntttttttttttttttttttttttttttttt

SEQ ID NO: 1674 - DNA, 84 bp, synthetic construct
  source 1..84: mol_type = other DNA
tttttttaagcagtggtatcaacgcagagtacnngcctatctnnagctggtanntttttttttttttttttttttttttttttt

SEQ ID NO: 1675 - DNA, 84 bp, synthetic construct
  source 1..84: mol_type = other DNA
tttttttaagcagtggtatcaacgcagagtacnngcctatctnnaactaggcnntttttttttttttttttttttttttttttt

SEQ ID NO: 1676 - DNA, 84 bp, synthetic construct
  source 1..84: mol_type = other DNA
tttttttaagcagtggtatcaacgcagagtacnngcctatctnncagcaagtnntttttttttttttttttttttttttttttt

SEQ ID NO: 1677 - DNA, 84 bp, synthetic construct
  source 1..84: mol_type = other DNA
tttttttaagcagtggtatcaacgcagagtacnngcctatctnnacgaggtanntttttttttttttttttttttttttttttt

SEQ ID NO: 1678 - DNA, 84 bp, synthetic construct
  source 1..84: mol_type = other DNA
tttttttaagcagtggtatcaacgcagagtacnngcctatctnncatcttccnntttttttttttttttttttttttttttttt

SEQ ID NO: 1679 - DNA, 84 bp, synthetic construct
  source 1..84: mol_type = other DNA
tttttttaagcagtggtatcaacgcagagtacnngcctatctnncctgaatcnntttttttttttttttttttttttttttttt

SEQ ID NO: 1680 - DNA, 84 bp, synthetic construct
  source 1..84: mol_type = other DNA
tttttttaagcagtggtatcaacgcagagtacnngcctatctnntgcagactnntttttttttttttttttttttttttttttt

SEQ ID NO: 1681 - DNA, 84 bp, synthetic construct
  source 1..84: mol_type = other DNA
tttttttaagcagtggtatcaacgcagagtacnngcctatctnnagatgtggnntttttttttttttttttttttttttttttt

SEQ ID NO: 1682 - DNA, 84 bp, synthetic construct
  source 1..84: mol_type = other DNA
tttttttaagcagtggtatcaacgcagagtacnngcctatctnnagttcgacnntttttttttttttttttttttttttttttt

SEQ ID NO: 1683 - DNA, 84 bp, synthetic construct
  source 1..84: mol_type = other DNA
tttttttaagcagtggtatcaacgcagagtacnngcctatctnnacaacctcnntttttttttttttttttttttttttttttt

SEQ ID NO: 1684 - DNA, 84 bp, synthetic construct
  source 1..84: mol_type = other DNA
tttttttaagcagtggtatcaacgcagagtacnngcctatctnncatggtagnntttttttttttttttttttttttttttttt

SEQ ID NO: 1685 - DNA, 84 bp, synthetic construct
  source 1..84: mol_type = other DNA
tttttttaagcagtggtatcaacgcagagtacnngcctatctnncgtatctcnntttttttttttttttttttttttttttttt

SEQ ID NO: 1686 - DNA, 84 bp, synthetic construct
  source 1..84: mol_type = other DNA
tttttttaagcagtggtatcaacgcagagtacnngcctatctnncctagttcnntttttttttttttttttttttttttttttt

SEQ ID NO: 1687 - DNA, 84 bp, synthetic construct
  source 1..84: mol_type = other DNA
tttttttaagcagtggtatcaacgcagagtacnngcctatctnncaagagtcnntttttttttttttttttttttttttttttt

SEQ ID NO: 1688 - DNA, 84 bp, synthetic construct
  source 1..84: mol_type = other DNA
tttttttaagcagtggtatcaacgcagagtacnntggtgagannaatcggcanntttttttttttttttttttttttttttttt

SEQ ID NO: 1689 - DNA, 84 bp, synthetic construct
  source 1..84: mol_type = other DNA
tttttttaagcagtggtatcaacgcagagtacnntggtgaganntacggcatnntttttttttttttttttttttttttttttt

SEQ ID NO: 1690 - DNA, 84 bp, synthetic construct
  source 1..84: mol_type = other DNA
tttttttaagcagtggtatcaacgcagagtacnntggtgagannttggatcgnntttttttttttttttttttttttttttttt

SEQ ID NO: 1691 - DNA, 84 bp, synthetic construct
  source 1..84: mol_type = other DNA
tttttttaagcagtggtatcaacgcagagtacnntggtgaganntggaacganntttttttttttttttttttttttttttttt

SEQ ID NO: 1692 - DNA, 84 bp, synthetic construct
  source 1..84: mol_type = other DNA
tttttttaagcagtggtatcaacgcagagtacnntggtgagannggcaatcanntttttttttttttttttttttttttttttt

SEQ ID NO: 1693 - DNA, 84 bp, synthetic construct
  source 1..84: mol_type = other DNA
tttttttaagcagtggtatcaacgcagagtacnntggtgaganngaatccganntttttttttttttttttttttttttttttt

SEQ ID NO: 1694 - DNA, 84 bp, synthetic construct
  source 1..84: mol_type = other DNA
tttttttaagcagtggtatcaacgcagagtacnntggtgagannttacggtgnntttttttttttttttttttttttttttttt

SEQ ID NO: 1695 - DNA, 84 bp, synthetic construct
  source 1..84: mol_type = other DNA
tttttttaagcagtggtatcaacgcagagtacnntggtgaganncatatcggnntttttttttttttttttttttttttttttt

SEQ ID NO: 1696 - DNA, 84 bp, synthetic construct
  source 1..84: mol_type = other DNA
tttttttaagcagtggtatcaacgcagagtacnntggtgaganncttcggtanntttttttttttttttttttttttttttttt

SEQ ID NO: 1697 - DNA, 84 bp, synthetic construct
  source 1..84: mol_type = other DNA
tttttttaagcagtggtatcaacgcagagtacnntggtgaganntcctaacgnntttttttttttttttttttttttttttttt

SEQ ID NO: 1698 - DNA, 84 bp, synthetic construct
  source 1..84: mol_type = other DNA
tttttttaagcagtggtatcaacgcagagtacnntggtgaganngtaagccanntttttttttttttttttttttttttttttt

SEQ ID NO: 1699 - DNA, 84 bp, synthetic construct
  source 1..84: mol_type = other DNA
tttttttaagcagtggtatcaacgcagagtacnntggtgaganntaaggtggnntttttttttttttttttttttttttttttt

SEQ ID NO: 1700 - DNA, 84 bp, synthetic construct
  source 1..84: mol_type = other DNA
tttttttaagcagtggtatcaacgcagagtacnntggtgagannggtaagctnntttttttttttttttttttttttttttttt

SEQ ID NO: 1701 - DNA, 84 bp, synthetic construct
  source 1..84: mol_type = other DNA
tttttttaagcagtggtatcaacgcagagtacnntggtgaganntgtgtcganntttttttttttttttttttttttttttttt

SEQ ID NO: 1702 - DNA, 84 bp, synthetic construct
  source 1..84: mol_type = other DNA
tttttttaagcagtggtatcaacgcagagtacnntggtgaganngagcatganntttttttttttttttttttttttttttttt

SEQ ID NO: 1703 - DNA, 84 bp, synthetic construct
  source 1..84: mol_type = other DNA
tttttttaagcagtggtatcaacgcagagtacnntggtgaganntcgaagtcnntttttttttttttttttttttttttttttt

SEQ ID NO: 1704 - DNA, 84 bp, synthetic construct
  source 1..84: mol_type = other DNA
tttttttaagcagtggtatcaacgcagagtacnntggtgagannggtgaacanntttttttttttttttttttttttttttttt

SEQ ID NO: 1705 - DNA, 84 bp, synthetic construct
  source 1..84: mol_type = other DNA
tttttttaagcagtggtatcaacgcagagtacnntggtgagannacatgcacnntttttttttttttttttttttttttttttt

SEQ ID NO: 1706 - DNA, 84 bp, synthetic construct
  source 1..84: mol_type = other DNA
tttttttaagcagtggtatcaacgcagagtacnntggtgagannccaacagtnntttttttttttttttttttttttttttttt

SEQ ID NO: 1707 - DNA, 84 bp, synthetic construct
  source 1..84: mol_type = other DNA
tttttttaagcagtggtatcaacgcagagtacnntggtgagannagaacagcnntttttttttttttttttttttttttttttt

SEQ ID NO: 1708 - DNA, 84 bp, synthetic construct
  source 1..84: mol_type = other DNA
tttttttaagcagtggtatcaacgcagagtacnntggtgaganngaacacgtnntttttttttttttttttttttttttttttt

SEQ ID NO: 1709 - DNA, 84 bp, synthetic construct
  source 1..84: mol_type = other DNA
tttttttaagcagtggtatcaacgcagagtacnntggtgagannggtcttcanntttttttttttttttttttttttttttttt

SEQ ID NO: 1710 - DNA, 84 bp, synthetic construct
  source 1..84: mol_type = other DNA
tttttttaagcagtggtatcaacgcagagtacnntggtgagannaggttcagnntttttttttttttttttttttttttttttt

SEQ ID NO: 1711 - DNA, 84 bp, synthetic construct
  source 1..84: mol_type = other DNA
tttttttaagcagtggtatcaacgcagagtacnntggtgagannctagagcanntttttttttttttttttttttttttttttt

SEQ ID NO: 1712 - DNA, 84 bp, synthetic construct
  source 1..84: mol_type = other DNA
tttttttaagcagtggtatcaacgcagagtacnntggtgaganncttctagcnntttttttttttttttttttttttttttttt

SEQ ID NO: 1713 - DNA, 84 bp, synthetic construct
  source 1..84: mol_type = other DNA
tttttttaagcagtggtatcaacgcagagtacnntggtgaganngagtaacgnntttttttttttttttttttttttttttttt

SEQ ID NO: 1714 - DNA, 84 bp, synthetic construct
  source 1..84: mol_type = other DNA
tttttttaagcagtggtatcaacgcagagtacnntggtgagannctaagaggnntttttttttttttttttttttttttttttt

SEQ ID NO: 1715 - DNA, 84 bp, synthetic construct
  source 1..84: mol_type = other DNA
tttttttaagcagtggtatcaacgcagagtacnntggtgagannacgtgtagnntttttttttttttttttttttttttttttt

SEQ ID NO: 1716 - DNA, 84 bp, synthetic construct
  source 1..84: mol_type = other DNA
tttttttaagcagtggtatcaacgcagagtacnntggtgagannactacaggnntttttttttttttttttttttttttttttt

SEQ ID NO: 1717 - DNA, 84 bp, synthetic construct
  source 1..84: mol_type = other DNA
tttttttaagcagtggtatcaacgcagagtacnntggtgaganntacaggtcnntttttttttttttttttttttttttttttt

SEQ ID NO: 1718 - DNA, 84 bp, synthetic construct
  source 1..84: mol_type = other DNA
tttttttaagcagtggtatcaacgcagagtacnntggtgagannctcacatgnntttttttttttttttttttttttttttttt

SEQ ID NO: 1719 - DNA, 84 bp, synthetic construct
  source 1..84: mol_type = other DNA
tttttttaagcagtggtatcaacgcagagtacnntggtgagannactaggagnntttttttttttttttttttttttttttttt

SEQ ID NO: 1720 - DNA, 84 bp, synthetic construct
  source 1..84: mol_type = other DNA
tttttttaagcagtggtatcaacgcagagtacnntggtgagannccatagganntttttttttttttttttttttttttttttt

SEQ ID NO: 1721 - DNA, 84 bp, synthetic construct
  source 1..84: mol_type = other DNA
tttttttaagcagtggtatcaacgcagagtacnntggtgagannggagaatcnntttttttttttttttttttttttttttttt

SEQ ID NO: 1722 - DNA, 84 bp, synthetic construct
  source 1..84: mol_type = other DNA
tttttttaagcagtggtatcaacgcagagtacnntggtgaganngccaagaanntttttttttttttttttttttttttttttt

SEQ ID NO: 1723 - DNA, 84 bp, synthetic construct
  source 1..84: mol_type = other DNA
tttttttaagcagtggtatcaacgcagagtacnntggtgagannaaggcaagnntttttttttttttttttttttttttttttt

SEQ ID NO: 1724 - DNA, 84 bp, synthetic construct
  source 1..84: mol_type = other DNA
tttttttaagcagtggtatcaacgcagagtacnntggtgagannaatgtcgcnntttttttttttttttttttttttttttttt

SEQ ID NO: 1725 - DNA, 84 bp, synthetic construct
  source 1..84: mol_type = other DNA
tttttttaagcagtggtatcaacgcagagtacnntggtgagannatggaaccnntttttttttttttttttttttttttttttt

SEQ ID NO: 1726 - DNA, 84 bp, synthetic construct
  source 1..84: mol_type = other DNA
tttttttaagcagtggtatcaacgcagagtacnntggtgagannagaggcatnntttttttttttttttttttttttttttttt

SEQ ID NO: 1727 - DNA, 84 bp, synthetic construct
  source 1..84: mol_type = other DNA
tttttttaagcagtggtatcaacgcagagtacnntggtgaganntgcatagcnntttttttttttttttttttttttttttttt

SEQ ID NO: 1728 - DNA, 84 bp, synthetic construct
  source 1..84: mol_type = other DNA
tttttttaagcagtggtatcaacgcagagtacnntggtgagannctaacgganntttttttttttttttttttttttttttttt

SEQ ID NO: 1729 - DNA, 84 bp, synthetic construct
  source 1..84: mol_type = other DNA
tttttttaagcagtggtatcaacgcagagtacnntggtgaganntatcgaggnntttttttttttttttttttttttttttttt

SEQ ID NO: 1730 - DNA, 84 bp, synthetic construct
  source 1..84: mol_type = other DNA
tttttttaagcagtggtatcaacgcagagtacnntggtgaganncatagcctnntttttttttttttttttttttttttttttt

SEQ ID NO: 1731 - DNA, 84 bp, synthetic construct
  source 1..84: mol_type = other DNA
tttttttaagcagtggtatcaacgcagagtacnntggtgagannatcgagacnntttttttttttttttttttttttttttttt

SEQ ID NO: 1732 - DNA, 84 bp, synthetic construct
  source 1..84: mol_type = other DNA
tttttttaagcagtggtatcaacgcagagtacnntggtgagannggaagagtnntttttttttttttttttttttttttttttt

SEQ ID NO: 1733 - DNA, 84 bp, synthetic construct
  source 1..84: mol_type = other DNA
tttttttaagcagtggtatcaacgcagagtacnntggtgagannccaagtagnntttttttttttttttttttttttttttttt

SEQ ID NO: 1734 - DNA, 84 bp, synthetic construct
  source 1..84: mol_type = other DNA
tttttttaagcagtggtatcaacgcagagtacnntggtgagannctgaacagnntttttttttttttttttttttttttttttt

SEQ ID NO: 1735 - DNA, 84 bp, synthetic construct
  source 1..84: mol_type = other DNA
tttttttaagcagtggtatcaacgcagagtacnntggtgaganngtaggttcnntttttttttttttttttttttttttttttt

SEQ ID NO: 1736 - DNA, 84 bp, synthetic construct
  source 1..84: mol_type = other DNA
tttttttaagcagtggtatcaacgcagagtacnntggtgaganngtatggacnntttttttttttttttttttttttttttttt

SEQ ID NO: 1737 - DNA, 84 bp, synthetic construct
  source 1..84: mol_type = other DNA
tttttttaagcagtggtatcaacgcagagtacnntggtgaganntcgcaacanntttttttttttttttttttttttttttttt

SEQ ID NO: 1738 - DNA, 84 bp, synthetic construct
  source 1..84: mol_type = other DNA
tttttttaagcagtggtatcaacgcagagtacnntggtgagannccgctaatnntttttttttttttttttttttttttttttt

SEQ ID NO: 1739 - DNA, 84 bp, synthetic construct
  source 1..84: mol_type = other DNA
tttttttaagcagtggtatcaacgcagagtacnntggtgaganngattcgcanntttttttttttttttttttttttttttttt

SEQ ID NO: 1740 - DNA, 84 bp, synthetic construct
  source 1..84: mol_type = other DNA
tttttttaagcagtggtatcaacgcagagtacnntggtgaganncgatggaanntttttttttttttttttttttttttttttt

SEQ ID NO: 1741 - DNA, 84 bp, synthetic construct
  source 1..84: mol_type = other DNA
tttttttaagcagtggtatcaacgcagagtacnntggtgagannagcaagganntttttttttttttttttttttttttttttt

SEQ ID NO: 1742 - DNA, 84 bp, synthetic construct
  source 1..84: mol_type = other DNA
tttttttaagcagtggtatcaacgcagagtacnntggtgaganncgtagcaanntttttttttttttttttttttttttttttt

SEQ ID NO: 1743 - DNA, 84 bp, synthetic construct
  source 1..84: mol_type = other DNA
tttttttaagcagtggtatcaacgcagagtacnntggtgaganntggcagtanntttttttttttttttttttttttttttttt

SEQ ID NO: 1744 - DNA, 84 bp, synthetic construct
  source 1..84: mol_type = other DNA
tttttttaagcagtggtatcaacgcagagtacnntggtgaganncggtagttnntttttttttttttttttttttttttttttt

SEQ ID NO: 1745 - DNA, 84 bp, synthetic construct
  source 1..84: mol_type = other DNA
tttttttaagcagtggtatcaacgcagagtacnntggtgaganntgacttcgnntttttttttttttttttttttttttttttt

SEQ ID NO: 1746 - DNA, 84 bp, synthetic construct
  source 1..84: mol_type = other DNA
tttttttaagcagtggtatcaacgcagagtacnntggtgaganngagtgcaanntttttttttttttttttttttttttttttt

SEQ ID NO: 1747 - DNA, 84 bp, synthetic construct
  source 1..84: mol_type = other DNA
tttttttaagcagtggtatcaacgcagagtacnntggtgagannacggtaacnntttttttttttttttttttttttttttttt

SEQ ID NO: 1748 - DNA, 84 bp, synthetic construct
  source 1..84: mol_type = other DNA
tttttttaagcagtggtatcaacgcagagtacnntggtgagannaagtggtgnntttttttttttttttttttttttttttttt

SEQ ID NO: 1749 - DNA, 84 bp, synthetic construct
  source 1..84: mol_type = other DNA
tttttttaagcagtggtatcaacgcagagtacnntggtgagannggagacaanntttttttttttttttttttttttttttttt

SEQ ID NO: 1750 - DNA, 84 bp, synthetic construct
  source 1..84: mol_type = other DNA
tttttttaagcagtggtatcaacgcagagtacnntggtgaganntcaaggacnntttttttttttttttttttttttttttttt

SEQ ID NO: 1751 - DNA, 84 bp, synthetic construct
  source 1..84: mol_type = other DNA
tttttttaagcagtggtatcaacgcagagtacnntggtgagannaagagagcnntttttttttttttttttttttttttttttt

SEQ ID NO: 1752 - DNA, 84 bp, synthetic construct
  source 1..84: mol_type = other DNA
tttttttaagcagtggtatcaacgcagagtacnntggtgaganncgagagatnntttttttttttttttttttttttttttttt

SEQ ID NO: 1753 - DNA, 84 bp, synthetic construct
  source 1..84: mol_type = other DNA
tttttttaagcagtggtatcaacgcagagtacnntggtgagannacagatggnntttttttttttttttttttttttttttttt

SEQ ID NO: 1754 - DNA, 84 bp, synthetic construct
  source 1..84: mol_type = other DNA
tttttttaagcagtggtatcaacgcagagtacnntggtgagannaggagtcanntttttttttttttttttttttttttttttt

SEQ ID NO: 1755 - DNA, 84 bp, synthetic construct
  source 1..84: mol_type = other DNA
tttttttaagcagtggtatcaacgcagagtacnntggtgaganncgtgttacnntttttttttttttttttttttttttttttt

SEQ ID NO: 1756 - DNA, 84 bp, synthetic construct
  source 1..84: mol_type = other DNA
tttttttaagcagtggtatcaacgcagagtacnntggtgaganntagtgtgcnntttttttttttttttttttttttttttttt

SEQ ID NO: 1757 - DNA, 84 bp, synthetic construct
  source 1..84: mol_type = other DNA
tttttttaagcagtggtatcaacgcagagtacnntggtgagannctcatgacnntttttttttttttttttttttttttttttt

SEQ ID NO: 1758 - DNA, 84 bp, synthetic construct
  source 1..84: mol_type = other DNA
tttttttaagcagtggtatcaacgcagagtacnntggtgaganngtatccagnntttttttttttttttttttttttttttttt

SEQ ID NO: 1759 - DNA, 84 bp, synthetic construct
  source 1..84: mol_type = other DNA
tttttttaagcagtggtatcaacgcagagtacnntggtgagannacgcctatnntttttttttttttttttttttttttttttt

SEQ ID NO: 1760 - DNA, 84 bp, synthetic construct
  source 1..84: mol_type = other DNA
tttttttaagcagtggtatcaacgcagagtacnntggtgagannaacgacctnntttttttttttttttttttttttttttttt

SEQ ID NO: 1761 - DNA, 84 bp, synthetic construct
  source 1..84: mol_type = other DNA
tttttttaagcagtggtatcaacgcagagtacnntggtgagannatcaggctnntttttttttttttttttttttttttttttt

SEQ ID NO: 1762 - DNA, 84 bp, synthetic construct
  source 1..84: mol_type = other DNA
tttttttaagcagtggtatcaacgcagagtacnntggtgaganncaagttcgnntttttttttttttttttttttttttttttt

SEQ ID NO: 1763 - DNA, 84 bp, synthetic construct
  source 1..84: mol_type = other DNA
tttttttaagcagtggtatcaacgcagagtacnntggtgaganntagccaganntttttttttttttttttttttttttttttt

SEQ ID NO: 1764 - DNA, 84 bp, synthetic construct
  source 1..84: mol_type = other DNA
tttttttaagcagtggtatcaacgcagagtacnntggtgaganncaatcacgnntttttttttttttttttttttttttttttt

SEQ ID NO: 1765 - DNA, 84 bp, synthetic construct
  source 1..84: mol_type = other DNA
tttttttaagcagtggtatcaacgcagagtacnntggtgaganngcaacaagnntttttttttttttttttttttttttttttt

SEQ ID NO: 1766 - DNA, 84 bp, synthetic construct
  source 1..84: mol_type = other DNA
tttttttaagcagtggtatcaacgcagagtacnntggtgaganncacgacaanntttttttttttttttttttttttttttttt

SEQ ID NO: 1767 - DNA, 84 bp, synthetic construct
  source 1..84: mol_type = other DNA
tttttttaagcagtggtatcaacgcagagtacnntggtgaganntacggaganntttttttttttttttttttttttttttttt

SEQ ID NO: 1768 - DNA, 84 bp, synthetic construct
  source 1..84: mol_type = other DNA
tttttttaagcagtggtatcaacgcagagtacnntggtgaganncgacaaganntttttttttttttttttttttttttttttt

SEQ ID NO: 1769 - DNA, 84 bp, synthetic construct
  source 1..84: mol_type = other DNA
tttttttaagcagtggtatcaacgcagagtacnntggtgaganncgaagtganntttttttttttttttttttttttttttttt

SEQ ID NO: 1770 - DNA, 84 bp, synthetic construct
  source 1..84: mol_type = other DNA
tttttttaagcagtggtatcaacgcagagtacnntggtgagannagctggtanntttttttttttttttttttttttttttttt

SEQ ID NO: 1771 - DNA, 84 bp, synthetic construct
  source 1..84: mol_type = other DNA
tttttttaagcagtggtatcaacgcagagtacnntggtgagannaactaggcnntttttttttttttttttttttttttttttt

SEQ ID NO: 1772 - DNA, 84 bp, synthetic construct
  source 1..84: mol_type = other DNA
tttttttaagcagtggtatcaacgcagagtacnntggtgaganncagcaagtnntttttttttttttttttttttttttttttt

SEQ ID NO: 1773 - DNA, 84 bp, synthetic construct
  source 1..84: mol_type = other DNA
tttttttaagcagtggtatcaacgcagagtacnntggtgagannacgaggtanntttttttttttttttttttttttttttttt

SEQ ID NO: 1774 - DNA, 84 bp, synthetic construct
  source 1..84: mol_type = other DNA
tttttttaagcagtggtatcaacgcagagtacnntggtgaganncatcttccnntttttttttttttttttttttttttttttt

SEQ ID NO: 1775 - DNA, 84 bp, synthetic construct
  source 1..84: mol_type = other DNA
tttttttaagcagtggtatcaacgcagagtacnntggtgaganncctgaatcnntttttttttttttttttttttttttttttt

SEQ ID NO: 1776 - DNA, 84 bp, synthetic construct
  source 1..84: mol_type = other DNA
tttttttaagcagtggtatcaacgcagagtacnntggtgaganntgcagactnntttttttttttttttttttttttttttttt

SEQ ID NO: 1777 - DNA, 84 bp, synthetic construct
  source 1..84: mol_type = other DNA
tttttttaagcagtggtatcaacgcagagtacnntggtgagannagatgtggnntttttttttttttttttttttttttttttt

SEQ ID NO: 1778 - DNA, 84 bp, synthetic construct
  source 1..84: mol_type = other DNA
tttttttaagcagtggtatcaacgcagagtacnntggtgagannagttcgacnntttttttttttttttttttttttttttttt

SEQ ID NO: 1779 - DNA, 84 bp, synthetic construct
  source 1..84: mol_type = other DNA
tttttttaagcagtggtatcaacgcagagtacnntggtgagannacaacctcnntttttttttttttttttttttttttttttt

SEQ ID NO: 1780 - DNA, 84 bp, synthetic construct
  source 1..84: mol_type = other DNA
tttttttaagcagtggtatcaacgcagagtacnntggtgaganncatggtagnntttttttttttttttttttttttttttttt

SEQ ID NO: 1781 - DNA, 84 bp, synthetic construct
  source 1..84: mol_type = other DNA
tttttttaagcagtggtatcaacgcagagtacnntggtgaganncgtatctcnntttttttttttttttttttttttttttttt

SEQ ID NO: 1782 - DNA, 84 bp, synthetic construct
  source 1..84: mol_type = other DNA
tttttttaagcagtggtatcaacgcagagtacnntggtgaganncctagttcnntttttttttttttttttttttttttttttt

SEQ ID NO: 1783 - DNA, 84 bp, synthetic construct
  source 1..84: mol_type = other DNA
tttttttaagcagtggtatcaacgcagagtacnntggtgaganncaagagtcnntttttttttttttttttttttttttttttt

SEQ ID NO: 1784 - DNA, 84 bp, synthetic construct
  source 1..84: mol_type = other DNA
tttttttaagcagtggtatcaacgcagagtacnncgatctagnnaatcggcanntttttttttttttttttttttttttttttt

SEQ ID NO: 1785 - DNA, 84 bp, synthetic construct
  source 1..84: mol_type = other DNA
tttttttaagcagtggtatcaacgcagagtacnncgatctagnntacggcatnntttttttttttttttttttttttttttttt

SEQ ID NO: 1786 - DNA, 84 bp, synthetic construct
  source 1..84: mol_type = other DNA
tttttttaagcagtggtatcaacgcagagtacnncgatctagnnttggatcgnntttttttttttttttttttttttttttttt

SEQ ID NO: 1787 - DNA, 84 bp, synthetic construct
  source 1..84: mol_type = other DNA
tttttttaagcagtggtatcaacgcagagtacnncgatctagnntggaacganntttttttttttttttttttttttttttttt

SEQ ID NO: 1788 - DNA, 84 bp, synthetic construct
  source 1..84: mol_type = other DNA
tttttttaagcagtggtatcaacgcagagtacnncgatctagnnggcaatcanntttttttttttttttttttttttttttttt

SEQ ID NO: 1789 - DNA, 84 bp, synthetic construct
  source 1..84: mol_type = other DNA
tttttttaagcagtggtatcaacgcagagtacnncgatctagnngaatccganntttttttttttttttttttttttttttttt

SEQ ID NO: 1790 - DNA, 84 bp, synthetic construct
  source 1..84: mol_type = other DNA
tttttttaagcagtggtatcaacgcagagtacnncgatctagnnttacggtgnntttttttttttttttttttttttttttttt

SEQ ID NO: 1791 - DNA, 84 bp, synthetic construct
  source 1..84: mol_type = other DNA
tttttttaagcagtggtatcaacgcagagtacnncgatctagnncatatcggnntttttttttttttttttttttttttttttt

SEQ ID NO: 1792 - DNA, 84 bp, synthetic construct
  source 1..84: mol_type = other DNA
tttttttaagcagtggtatcaacgcagagtacnncgatctagnncttcggtanntttttttttttttttttttttttttttttt

SEQ ID NO: 1793 - DNA, 84 bp, synthetic construct
  source 1..84: mol_type = other DNA
tttttttaagcagtggtatcaacgcagagtacnncgatctagnntcctaacgnntttttttttttttttttttttttttttttt

SEQ ID NO: 1794 - DNA, 84 bp, synthetic construct
  source 1..84: mol_type = other DNA
tttttttaagcagtggtatcaacgcagagtacnncgatctagnngtaagccanntttttttttttttttttttttttttttttt

SEQ ID NO: 1795 - DNA, 84 bp, synthetic construct
  source 1..84: mol_type = other DNA
tttttttaagcagtggtatcaacgcagagtacnncgatctagnntaaggtggnntttttttttttttttttttttttttttttt

SEQ ID NO: 1796 - DNA, 84 bp, synthetic construct
  source 1..84: mol_type = other DNA
tttttttaagcagtggtatcaacgcagagtacnncgatctagnnggtaagctnntttttttttttttttttttttttttttttt

SEQ ID NO: 1797 - DNA, 84 bp, synthetic construct
  source 1..84: mol_type = other DNA
tttttttaagcagtggtatcaacgcagagtacnncgatctagnntgtgtcganntttttttttttttttttttttttttttttt

SEQ ID NO: 1798 - DNA, 84 bp, synthetic construct
  source 1..84: mol_type = other DNA
tttttttaagcagtggtatcaacgcagagtacnncgatctagnngagcatganntttttttttttttttttttttttttttttt

SEQ ID NO: 1799 - DNA, 84 bp, synthetic construct
  source 1..84: mol_type = other DNA
tttttttaagcagtggtatcaacgcagagtacnncgatctagnntcgaagtcnntttttttttttttttttttttttttttttt

SEQ ID NO: 1800 - DNA, 84 bp, synthetic construct
  source 1..84: mol_type = other DNA
tttttttaagcagtggtatcaacgcagagtacnncgatctagnnggtgaacanntttttttttttttttttttttttttttttt

SEQ ID NO: 1801 - DNA, 84 bp, synthetic construct
  source 1..84: mol_type = other DNA
tttttttaagcagtggtatcaacgcagagtacnncgatctagnnacatgcacnntttttttttttttttttttttttttttttt

SEQ ID NO: 1802 - DNA, 84 bp, synthetic construct
  source 1..84: mol_type = other DNA
tttttttaagcagtggtatcaacgcagagtacnncgatctagnnccaacagtnntttttttttttttttttttttttttttttt

SEQ ID NO: 1803 - DNA, 84 bp, synthetic construct
  source 1..84: mol_type = other DNA
tttttttaagcagtggtatcaacgcagagtacnncgatctagnnagaacagcnntttttttttttttttttttttttttttttt

SEQ ID NO: 1804 - DNA, 84 bp, synthetic construct
  source 1..84: mol_type = other DNA
tttttttaagcagtggtatcaacgcagagtacnncgatctagnngaacacgtnntttttttttttttttttttttttttttttt

SEQ ID NO: 1805 - DNA, 84 bp, synthetic construct
  source 1..84: mol_type = other DNA
tttttttaagcagtggtatcaacgcagagtacnncgatctagnnggtcttcanntttttttttttttttttttttttttttttt

SEQ ID NO: 1806 - DNA, 84 bp, synthetic construct
  source 1..84: mol_type = other DNA
tttttttaagcagtggtatcaacgcagagtacnncgatctagnnaggttcagnntttttttttttttttttttttttttttttt

SEQ ID NO: 1807 - DNA, 84 bp, synthetic construct
  source 1..84: mol_type = other DNA
tttttttaagcagtggtatcaacgcagagtacnncgatctagnnctagagcanntttttttttttttttttttttttttttttt

SEQ ID NO: 1808 - DNA, 84 bp, synthetic construct
  source 1..84: mol_type = other DNA
tttttttaagcagtggtatcaacgcagagtacnncgatctagnncttctagcnntttttttttttttttttttttttttttttt

SEQ ID NO: 1809 - DNA, 84 bp, synthetic construct
  source 1..84: mol_type = other DNA
tttttttaagcagtggtatcaacgcagagtacnncgatctagnngagtaacgnntttttttttttttttttttttttttttttt

SEQ ID NO: 1810 - DNA, 84 bp, synthetic construct
  source 1..84: mol_type = other DNA
tttttttaagcagtggtatcaacgcagagtacnncgatctagnnctaagaggnntttttttttttttttttttttttttttttt

SEQ ID NO: 1811 - DNA, 84 bp, synthetic construct
  source 1..84: mol_type = other DNA
tttttttaagcagtggtatcaacgcagagtacnncgatctagnnacgtgtagnntttttttttttttttttttttttttttttt

SEQ ID NO: 1812 - DNA, 84 bp, synthetic construct
  source 1..84: mol_type = other DNA
tttttttaagcagtggtatcaacgcagagtacnncgatctagnnactacaggnntttttttttttttttttttttttttttttt

SEQ ID NO: 1813 - DNA, 84 bp, synthetic construct
  source 1..84: mol_type = other DNA
tttttttaagcagtggtatcaacgcagagtacnncgatctagnntacaggtcnntttttttttttttttttttttttttttttt

SEQ ID NO: 1814 - DNA, 84 bp, synthetic construct
  source 1..84: mol_type = other DNA
tttttttaagcagtggtatcaacgcagagtacnncgatctagnnctcacatgnntttttttttttttttttttttttttttttt

SEQ ID NO: 1815 - DNA, 84 bp, synthetic construct
  source 1..84: mol_type = other DNA
tttttttaagcagtggtatcaacgcagagtacnncgatctagnnactaggagnntttttttttttttttttttttttttttttt

SEQ ID NO: 1816 - DNA, 84 bp, synthetic construct
  source 1..84: mol_type = other DNA
tttttttaagcagtggtatcaacgcagagtacnncgatctagnnccatagganntttttttttttttttttttttttttttttt

SEQ ID NO: 1817 - DNA, 84 bp, synthetic construct
  source 1..84: mol_type = other DNA
tttttttaagcagtggtatcaacgcagagtacnncgatctagnnggagaatcnntttttttttttttttttttttttttttttt

SEQ ID NO: 1818 - DNA, 84 bp, synthetic construct
  source 1..84: mol_type = other DNA
tttttttaagcagtggtatcaacgcagagtacnncgatctagnngccaagaanntttttttttttttttttttttttttttttt

SEQ ID NO: 1819 - DNA, 84 bp, synthetic construct
  source 1..84: mol_type = other DNA
tttttttaagcagtggtatcaacgcagagtacnncgatctagnnaaggcaagnntttttttttttttttttttttttttttttt

SEQ ID NO: 1820 - DNA, 84 bp, synthetic construct
  source 1..84: mol_type = other DNA
tttttttaagcagtggtatcaacgcagagtacnncgatctagnnaatgtcgcnntttttttttttttttttttttttttttttt

SEQ ID NO: 1821 - DNA, 84 bp, synthetic construct
  source 1..84: mol_type = other DNA
tttttttaagcagtggtatcaacgcagagtacnncgatctagnnatggaaccnntttttttttttttttttttttttttttttt

SEQ ID NO: 1822 - DNA, 84 bp, synthetic construct
  source 1..84: mol_type = other DNA
tttttttaagcagtggtatcaacgcagagtacnncgatctagnnagaggcatnntttttttttttttttttttttttttttttt

SEQ ID NO: 1823 - DNA, 84 bp, synthetic construct
  source 1..84: mol_type = other DNA
tttttttaagcagtggtatcaacgcagagtacnncgatctagnntgcatagcnntttttttttttttttttttttttttttttt

SEQ ID NO: 1824 - DNA, 84 bp, synthetic construct
  source 1..84: mol_type = other DNA
tttttttaagcagtggtatcaacgcagagtacnncgatctagnnctaacgganntttttttttttttttttttttttttttttt

SEQ ID NO: 1825 - DNA, 84 bp, synthetic construct
  source 1..84: mol_type = other DNA
tttttttaagcagtggtatcaacgcagagtacnncgatctagnntatcgaggnntttttttttttttttttttttttttttttt

SEQ ID NO: 1826 - DNA, 84 bp, synthetic construct
  source 1..84: mol_type = other DNA
tttttttaagcagtggtatcaacgcagagtacnncgatctagnncatagcctnntttttttttttttttttttttttttttttt

SEQ ID NO: 1827 - DNA, 84 bp, synthetic construct
  source 1..84: mol_type = other DNA
tttttttaagcagtggtatcaacgcagagtacnncgatctagnnatcgagacnntttttttttttttttttttttttttttttt

SEQ ID NO: 1828 - DNA, 84 bp, synthetic construct
  source 1..84: mol_type = other DNA
tttttttaagcagtggtatcaacgcagagtacnncgatctagnnggaagagtnntttttttttttttttttttttttttttttt

SEQ ID NO: 1829 - DNA, 84 bp, synthetic construct
  source 1..84: mol_type = other DNA
tttttttaagcagtggtatcaacgcagagtacnncgatctagnnccaagtagnntttttttttttttttttttttttttttttt

SEQ ID NO: 1830 - DNA, 84 bp, synthetic construct
  source 1..84: mol_type = other DNA
tttttttaagcagtggtatcaacgcagagtacnncgatctagnnctgaacagnntttttttttttttttttttttttttttttt

SEQ ID NO: 1831 - DNA, 84 bp, synthetic construct
  source 1..84: mol_type = other DNA
tttttttaagcagtggtatcaacgcagagtacnncgatctagnngtaggttcnntttttttttttttttttttttttttttttt

SEQ ID NO: 1832 - DNA, 84 bp, synthetic construct
  source 1..84: mol_type = other DNA
tttttttaagcagtggtatcaacgcagagtacnncgatctagnngtatggacnntttttttttttttttttttttttttttttt

SEQ ID NO: 1833 - DNA, 84 bp, synthetic construct
  source 1..84: mol_type = other DNA
tttttttaagcagtggtatcaacgcagagtacnncgatctagnntcgcaacanntttttttttttttttttttttttttttttt

SEQ ID NO: 1834 - DNA, 84 bp, synthetic construct
  source 1..84: mol_type = other DNA
tttttttaagcagtggtatcaacgcagagtacnncgatctagnnccgctaatnntttttttttttttttttttttttttttttt

SEQ ID NO: 1835 - DNA, 84 bp, synthetic construct
  source 1..84: mol_type = other DNA
tttttttaagcagtggtatcaacgcagagtacnncgatctagnngattcgcanntttttttttttttttttttttttttttttt

SEQ ID NO: 1836 - DNA, 84 bp, synthetic construct
  source 1..84: mol_type = other DNA
tttttttaagcagtggtatcaacgcagagtacnncgatctagnncgatggaanntttttttttttttttttttttttttttttt

SEQ ID NO: 1837 - DNA, 84 bp, synthetic construct
  source 1..84: mol_type = other DNA
tttttttaagcagtggtatcaacgcagagtacnncgatctagnnagcaagganntttttttttttttttttttttttttttttt

SEQ ID NO: 1838 - DNA, 84 bp, synthetic construct
  source 1..84: mol_type = other DNA
tttttttaagcagtggtatcaacgcagagtacnncgatctagnncgtagcaanntttttttttttttttttttttttttttttt

SEQ ID NO: 1839 - DNA, 84 bp, synthetic construct
  source 1..84: mol_type = other DNA
tttttttaagcagtggtatcaacgcagagtacnncgatctagnntggcagtanntttttttttttttttttttttttttttttt

SEQ ID NO: 1840 - DNA, 84 bp, synthetic construct
  source 1..84: mol_type = other DNA
tttttttaagcagtggtatcaacgcagagtacnncgatctagnncggtagttnntttttttttttttttttttttttttttttt

SEQ ID NO: 1841 - DNA, 84 bp, synthetic construct
  source 1..84: mol_type = other DNA
tttttttaagcagtggtatcaacgcagagtacnncgatctagnntgacttcgnntttttttttttttttttttttttttttttt

SEQ ID NO: 1842 - DNA, 84 bp, synthetic construct
  source 1..84: mol_type = other DNA
tttttttaagcagtggtatcaacgcagagtacnncgatctagnngagtgcaanntttttttttttttttttttttttttttttt

SEQ ID NO: 1843 - DNA, 84 bp, synthetic construct
  source 1..84: mol_type = other DNA
tttttttaagcagtggtatcaacgcagagtacnncgatctagnnacggtaacnntttttttttttttttttttttttttttttt

SEQ ID NO: 1844 - DNA, 84 bp, synthetic construct
  source 1..84: mol_type = other DNA
tttttttaagcagtggtatcaacgcagagtacnncgatctagnnaagtggtgnntttttttttttttttttttttttttttttt

SEQ ID NO: 1845 - DNA, 84 bp, synthetic construct
  source 1..84: mol_type = other DNA
tttttttaagcagtggtatcaacgcagagtacnncgatctagnnggagacaanntttttttttttttttttttttttttttttt

SEQ ID NO: 1846 - DNA, 84 bp, synthetic construct
  source 1..84: mol_type = other DNA
tttttttaagcagtggtatcaacgcagagtacnncgatctagnntcaaggacnntttttttttttttttttttttttttttttt

SEQ ID NO: 1847 - DNA, 84 bp, synthetic construct
  source 1..84: mol_type = other DNA
tttttttaagcagtggtatcaacgcagagtacnncgatctagnnaagagagcnntttttttttttttttttttttttttttttt

SEQ ID NO: 1848 - DNA, 84 bp, synthetic construct
  source 1..84: mol_type = other DNA
tttttttaagcagtggtatcaacgcagagtacnncgatctagnncgagagatnntttttttttttttttttttttttttttttt

SEQ ID NO: 1849 - DNA, 84 bp, synthetic construct
  source 1..84: mol_type = other DNA
tttttttaagcagtggtatcaacgcagagtacnncgatctagnnacagatggnntttttttttttttttttttttttttttttt

SEQ ID NO: 1850 - DNA, 84 bp, synthetic construct
  source 1..84: mol_type = other DNA
tttttttaagcagtggtatcaacgcagagtacnncgatctagnnaggagtcanntttttttttttttttttttttttttttttt

SEQ ID NO: 1851 - DNA, 84 bp, synthetic construct
  source 1..84: mol_type = other DNA
tttttttaagcagtggtatcaacgcagagtacnncgatctagnncgtgttacnntttttttttttttttttttttttttttttt

SEQ ID NO: 1852 - DNA, 84 bp, synthetic construct
  source 1..84: mol_type = other DNA
tttttttaagcagtggtatcaacgcagagtacnncgatctagnntagtgtgcnntttttttttttttttttttttttttttttt

SEQ ID NO: 1853 - DNA, 84 bp, synthetic construct
  source 1..84: mol_type = other DNA
tttttttaagcagtggtatcaacgcagagtacnncgatctagnnctcatgacnntttttttttttttttttttttttttttttt

SEQ ID NO: 1854 - DNA, 84 bp, synthetic construct
  source 1..84: mol_type = other DNA
tttttttaagcagtggtatcaacgcagagtacnncgatctagnngtatccagnntttttttttttttttttttttttttttttt

SEQ ID NO: 1855 - DNA, 84 bp, synthetic construct
  source 1..84: mol_type = other DNA
tttttttaagcagtggtatcaacgcagagtacnncgatctagnnacgcctatnntttttttttttttttttttttttttttttt

SEQ ID NO: 1856 - DNA, 84 bp, synthetic construct
  source 1..84: mol_type = other DNA
tttttttaagcagtggtatcaacgcagagtacnncgatctagnnaacgacctnntttttttttttttttttttttttttttttt

SEQ ID NO: 1857 - DNA, 84 bp, synthetic construct
  source 1..84: mol_type = other DNA
tttttttaagcagtggtatcaacgcagagtacnncgatctagnnatcaggctnntttttttttttttttttttttttttttttt

SEQ ID NO: 1858 - DNA, 84 bp, synthetic construct
  source 1..84: mol_type = other DNA
tttttttaagcagtggtatcaacgcagagtacnncgatctagnncaagttcgnntttttttttttttttttttttttttttttt

SEQ ID NO: 1859 - DNA, 84 bp, synthetic construct
  source 1..84: mol_type = other DNA
tttttttaagcagtggtatcaacgcagagtacnncgatctagnntagccaganntttttttttttttttttttttttttttttt

SEQ ID NO: 1860 - DNA, 84 bp, synthetic construct
  source 1..84: mol_type = other DNA
tttttttaagcagtggtatcaacgcagagtacnncgatctagnncaatcacgnntttttttttttttttttttttttttttttt

SEQ ID NO: 1861 - DNA, 84 bp, synthetic construct
  source 1..84: mol_type = other DNA
tttttttaagcagtggtatcaacgcagagtacnncgatctagnngcaacaagnntttttttttttttttttttttttttttttt

SEQ ID NO: 1862 - DNA, 84 bp, synthetic construct
  source 1..84: mol_type = other DNA
tttttttaagcagtggtatcaacgcagagtacnncgatctagnncacgacaanntttttttttttttttttttttttttttttt

SEQ ID NO: 1863 - DNA, 84 bp, synthetic construct
  source 1..84: mol_type = other DNA
tttttttaagcagtggtatcaacgcagagtacnncgatctagnntacggaganntttttttttttttttttttttttttttttt

SEQ ID NO: 1864 - DNA, 84 bp, synthetic construct
  source 1..84: mol_type = other DNA
tttttttaagcagtggtatcaacgcagagtacnncgatctagnncgacaaganntttttttttttttttttttttttttttttt

SEQ ID NO: 1865 - DNA, 84 bp, synthetic construct
  source 1..84: mol_type = other DNA
tttttttaagcagtggtatcaacgcagagtacnncgatctagnncgaagtganntttttttttttttttttttttttttttttt

SEQ ID NO: 1866 - DNA, 84 bp, synthetic construct
  source 1..84: mol_type = other DNA
tttttttaagcagtggtatcaacgcagagtacnncgatctagnnagctggtanntttttttttttttttttttttttttttttt

SEQ ID NO: 1867 - DNA, 84 bp, synthetic construct
  source 1..84: mol_type = other DNA
tttttttaagcagtggtatcaacgcagagtacnncgatctagnnaactaggcnntttttttttttttttttttttttttttttt

SEQ ID NO: 1868 - DNA, 84 bp, synthetic construct
  source 1..84: mol_type = other DNA
tttttttaagcagtggtatcaacgcagagtacnncgatctagnncagcaagtnntttttttttttttttttttttttttttttt

SEQ ID NO: 1869 - DNA, 84 bp, synthetic construct
  source 1..84: mol_type = other DNA
tttttttaagcagtggtatcaacgcagagtacnncgatctagnnacgaggtanntttttttttttttttttttttttttttttt

SEQ ID NO: 1870 - DNA, 84 bp, synthetic construct
  source 1..84: mol_type = other DNA
tttttttaagcagtggtatcaacgcagagtacnncgatctagnncatcttccnntttttttttttttttttttttttttttttt

SEQ ID NO: 1871 - DNA, 84 bp, synthetic construct
  source 1..84: mol_type = other DNA
tttttttaagcagtggtatcaacgcagagtacnncgatctagnncctgaatcnntttttttttttttttttttttttttttttt

SEQ ID NO: 1872 - DNA, 84 bp, synthetic construct
  source 1..84: mol_type = other DNA
tttttttaagcagtggtatcaacgcagagtacnncgatctagnntgcagactnntttttttttttttttttttttttttttttt

SEQ ID NO: 1873 - DNA, 84 bp, synthetic construct
  source 1..84: mol_type = other DNA
tttttttaagcagtggtatcaacgcagagtacnncgatctagnnagatgtggnntttttttttttttttttttttttttttttt

SEQ ID NO: 1874 - DNA, 84 bp, synthetic construct
  source 1..84: mol_type = other DNA
tttttttaagcagtggtatcaacgcagagtacnncgatctagnnagttcgacnntttttttttttttttttttttttttttttt

SEQ ID NO: 1875 - DNA, 84 bp, synthetic construct
  source 1..84: mol_type = other DNA
tttttttaagcagtggtatcaacgcagagtacnncgatctagnnacaacctcnntttttttttttttttttttttttttttttt

SEQ ID NO: 1876 - DNA, 84 bp, synthetic construct
  source 1..84: mol_type = other DNA
tttttttaagcagtggtatcaacgcagagtacnncgatctagnncatggtagnntttttttttttttttttttttttttttttt

SEQ ID NO: 1877 - DNA, 84 bp, synthetic construct
  source 1..84: mol_type = other DNA
tttttttaagcagtggtatcaacgcagagtacnncgatctagnncgtatctcnntttttttttttttttttttttttttttttt

SEQ ID NO: 1878 - DNA, 84 bp, synthetic construct
  source 1..84: mol_type = other DNA
tttttttaagcagtggtatcaacgcagagtacnncgatctagnncctagttcnntttttttttttttttttttttttttttttt

SEQ ID NO: 1879 - DNA, 84 bp, synthetic construct
  source 1..84: mol_type = other DNA
tttttttaagcagtggtatcaacgcagagtacnncgatctagnncaagagtcnntttttttttttttttttttttttttttttt

SEQ ID NO: 1880 - DNA, 84 bp, synthetic construct
  source 1..84: mol_type = other DNA
tttttttaagcagtggtatcaacgcagagtacnngtgtatggnnaatcggcanntttttttttttttttttttttttttttttt

SEQ ID NO: 1881 - DNA, 84 bp, synthetic construct
  source 1..84: mol_type = other DNA
tttttttaagcagtggtatcaacgcagagtacnngtgtatggnntacggcatnntttttttttttttttttttttttttttttt

SEQ ID NO: 1882 - DNA, 84 bp, synthetic construct
  source 1..84: mol_type = other DNA
tttttttaagcagtggtatcaacgcagagtacnngtgtatggnnttggatcgnntttttttttttttttttttttttttttttt

SEQ ID NO: 1883 - DNA, 84 bp, synthetic construct
  source 1..84: mol_type = other DNA
tttttttaagcagtggtatcaacgcagagtacnngtgtatggnntggaacganntttttttttttttttttttttttttttttt

SEQ ID NO: 1884 - DNA, 84 bp, synthetic construct
  source 1..84: mol_type = other DNA
tttttttaagcagtggtatcaacgcagagtacnngtgtatggnnggcaatcanntttttttttttttttttttttttttttttt

SEQ ID NO: 1885 - DNA, 84 bp, synthetic construct
  source 1..84: mol_type = other DNA
tttttttaagcagtggtatcaacgcagagtacnngtgtatggnngaatccganntttttttttttttttttttttttttttttt

SEQ ID NO: 1886 - DNA, 84 bp, synthetic construct
  source 1..84: mol_type = other DNA
tttttttaagcagtggtatcaacgcagagtacnngtgtatggnnttacggtgnntttttttttttttttttttttttttttttt

SEQ ID NO: 1887 - DNA, 84 bp, synthetic construct
  source 1..84: mol_type = other DNA
tttttttaagcagtggtatcaacgcagagtacnngtgtatggnncatatcggnntttttttttttttttttttttttttttttt

SEQ ID NO: 1888 - DNA, 84 bp, synthetic construct
  source 1..84: mol_type = other DNA
tttttttaagcagtggtatcaacgcagagtacnngtgtatggnncttcggtanntttttttttttttttttttttttttttttt

SEQ ID NO: 1889 - DNA, 84 bp, synthetic construct
  source 1..84: mol_type = other DNA
tttttttaagcagtggtatcaacgcagagtacnngtgtatggnntcctaacgnntttttttttttttttttttttttttttttt

SEQ ID NO: 1890 - DNA, 84 bp, synthetic construct
  source 1..84: mol_type = other DNA
tttttttaagcagtggtatcaacgcagagtacnngtgtatggnngtaagccanntttttttttttttttttttttttttttttt

SEQ ID NO: 1891 - DNA, 84 bp, synthetic construct
  source 1..84: mol_type = other DNA
tttttttaagcagtggtatcaacgcagagtacnngtgtatggnntaaggtggnntttttttttttttttttttttttttttttt

SEQ ID NO: 1892 - DNA, 84 bp, synthetic construct
  source 1..84: mol_type = other DNA
tttttttaagcagtggtatcaacgcagagtacnngtgtatggnnggtaagctnntttttttttttttttttttttttttttttt

SEQ ID NO: 1893 - DNA, 84 bp, synthetic construct
  source 1..84: mol_type = other DNA
tttttttaagcagtggtatcaacgcagagtacnngtgtatggnntgtgtcganntttttttttttttttttttttttttttttt

SEQ ID NO: 1894 - DNA, 84 bp, synthetic construct
  source 1..84: mol_type = other DNA
tttttttaagcagtggtatcaacgcagagtacnngtgtatggnngagcatganntttttttttttttttttttttttttttttt

SEQ ID NO: 1895 - DNA, 84 bp, synthetic construct
  source 1..84: mol_type = other DNA
tttttttaagcagtggtatcaacgcagagtacnngtgtatggnntcgaagtcnntttttttttttttttttttttttttttttt

SEQ ID NO: 1896 - DNA, 84 bp, synthetic construct
  source 1..84: mol_type = other DNA
tttttttaagcagtggtatcaacgcagagtacnngtgtatggnnggtgaacanntttttttttttttttttttttttttttttt

SEQ ID NO: 1897 - DNA, 84 bp, synthetic construct
  source 1..84: mol_type = other DNA
tttttttaagcagtggtatcaacgcagagtacnngtgtatggnnacatgcacnntttttttttttttttttttttttttttttt

SEQ ID NO: 1898 - DNA, 84 bp, synthetic construct
  source 1..84: mol_type = other DNA
tttttttaagcagtggtatcaacgcagagtacnngtgtatggnnccaacagtnntttttttttttttttttttttttttttttt

SEQ ID NO: 1899 - DNA, 84 bp, synthetic construct
  source 1..84: mol_type = other DNA
tttttttaagcagtggtatcaacgcagagtacnngtgtatggnnagaacagcnntttttttttttttttttttttttttttttt

SEQ ID NO: 1900 - DNA, 84 bp, synthetic construct
  source 1..84: mol_type = other DNA
tttttttaagcagtggtatcaacgcagagtacnngtgtatggnngaacacgtnntttttttttttttttttttttttttttttt

SEQ ID NO: 1901 - DNA, 84 bp, synthetic construct
  source 1..84: mol_type = other DNA
tttttttaagcagtggtatcaacgcagagtacnngtgtatggnnggtcttcanntttttttttttttttttttttttttttttt

SEQ ID NO: 1902 - DNA, 84 bp, synthetic construct
  source 1..84: mol_type = other DNA
tttttttaagcagtggtatcaacgcagagtacnngtgtatggnnaggttcagnntttttttttttttttttttttttttttttt

SEQ ID NO: 1903 - DNA, 84 bp, synthetic construct
  source 1..84: mol_type = other DNA
tttttttaagcagtggtatcaacgcagagtacnngtgtatggnnctagagcanntttttttttttttttttttttttttttttt

SEQ ID NO: 1904 - DNA, 84 bp, synthetic construct
  source 1..84: mol_type = other DNA
tttttttaagcagtggtatcaacgcagagtacnngtgtatggnncttctagcnntttttttttttttttttttttttttttttt

SEQ ID NO: 1905 - DNA, 84 bp, synthetic construct
  source 1..84: mol_type = other DNA
tttttttaagcagtggtatcaacgcagagtacnngtgtatggnngagtaacgnntttttttttttttttttttttttttttttt

SEQ ID NO: 1906 - DNA, 84 bp, synthetic construct
  source 1..84: mol_type = other DNA
tttttttaagcagtggtatcaacgcagagtacnngtgtatggnnctaagaggnntttttttttttttttttttttttttttttt

SEQ ID NO: 1907 - DNA, 84 bp, synthetic construct
  source 1..84: mol_type = other DNA
tttttttaagcagtggtatcaacgcagagtacnngtgtatggnnacgtgtagnntttttttttttttttttttttttttttttt

SEQ ID NO: 1908 - DNA, 84 bp, synthetic construct
  source 1..84: mol_type = other DNA
tttttttaagcagtggtatcaacgcagagtacnngtgtatggnnactacaggnntttttttttttttttttttttttttttttt

SEQ ID NO: 1909 - DNA, 84 bp, synthetic construct
  source 1..84: mol_type = other DNA
tttttttaagcagtggtatcaacgcagagtacnngtgtatggnntacaggtcnntttttttttttttttttttttttttttttt

SEQ ID NO: 1910 - DNA, 84 bp, synthetic construct
  source 1..84: mol_type = other DNA
tttttttaagcagtggtatcaacgcagagtacnngtgtatggnnctcacatgnntttttttttttttttttttttttttttttt

SEQ ID NO: 1911 - DNA, 84 bp, synthetic construct
  source 1..84: mol_type = other DNA
tttttttaagcagtggtatcaacgcagagtacnngtgtatggnnactaggagnntttttttttttttttttttttttttttttt

SEQ ID NO: 1912 - DNA, 84 bp, synthetic construct
  source 1..84: mol_type = other DNA
tttttttaagcagtggtatcaacgcagagtacnngtgtatggnnccatagganntttttttttttttttttttttttttttttt

SEQ ID NO: 1913 - DNA, 84 bp, synthetic construct
  source 1..84: mol_type = other DNA
tttttttaagcagtggtatcaacgcagagtacnngtgtatggnnggagaatcnntttttttttttttttttttttttttttttt

SEQ ID NO: 1914 - DNA, 84 bp, synthetic construct
  source 1..84: mol_type = other DNA
tttttttaagcagtggtatcaacgcagagtacnngtgtatggnngccaagaanntttttttttttttttttttttttttttttt

SEQ ID NO: 1915 - DNA, 84 bp, synthetic construct
  source 1..84: mol_type = other DNA
tttttttaagcagtggtatcaacgcagagtacnngtgtatggnnaaggcaagnntttttttttttttttttttttttttttttt

SEQ ID NO: 1916 - DNA, 84 bp, synthetic construct
  source 1..84: mol_type = other DNA
tttttttaagcagtggtatcaacgcagagtacnngtgtatggnnaatgtcgcnntttttttttttttttttttttttttttttt

SEQ ID NO: 1917 - DNA, 84 bp, synthetic construct
  source 1..84: mol_type = other DNA
tttttttaagcagtggtatcaacgcagagtacnngtgtatggnnatggaaccnntttttttttttttttttttttttttttttt

SEQ ID NO: 1918 - DNA, 84 bp, synthetic construct
  source 1..84: mol_type = other DNA
tttttttaagcagtggtatcaacgcagagtacnngtgtatggnnagaggcatnntttttttttttttttttttttttttttttt

SEQ ID NO: 1919 - DNA, 84 bp, synthetic construct
  source 1..84: mol_type = other DNA
tttttttaagcagtggtatcaacgcagagtacnngtgtatggnntgcatagcnntttttttttttttttttttttttttttttt

SEQ ID NO: 1920 - DNA, 84 bp, synthetic construct
  source 1..84: mol_type = other DNA
tttttttaagcagtggtatcaacgcagagtacnngtgtatggnnctaacgganntttttttttttttttttttttttttttttt

SEQ ID NO: 1921 - DNA, 84 bp, synthetic construct
  source 1..84: mol_type = other DNA
tttttttaagcagtggtatcaacgcagagtacnngtgtatggnntatcgaggnntttttttttttttttttttttttttttttt

SEQ ID NO: 1922 - DNA, 84 bp, synthetic construct
  source 1..84: mol_type = other DNA
tttttttaagcagtggtatcaacgcagagtacnngtgtatggnncatagcctnntttttttttttttttttttttttttttttt

SEQ ID NO: 1923 - DNA, 84 bp, synthetic construct
  source 1..84: mol_type = other DNA
tttttttaagcagtggtatcaacgcagagtacnngtgtatggnnatcgagacnntttttttttttttttttttttttttttttt

SEQ ID NO: 1924 - DNA, 84 bp, synthetic construct
  source 1..84: mol_type = other DNA
tttttttaagcagtggtatcaacgcagagtacnngtgtatggnnggaagagtnntttttttttttttttttttttttttttttt

SEQ ID NO: 1925 - DNA, 84 bp, synthetic construct
  source 1..84: mol_type = other DNA
tttttttaagcagtggtatcaacgcagagtacnngtgtatggnnccaagtagnntttttttttttttttttttttttttttttt

SEQ ID NO: 1926 - DNA, 84 bp, synthetic construct
  source 1..84: mol_type = other DNA
tttttttaagcagtggtatcaacgcagagtacnngtgtatggnnctgaacagnntttttttttttttttttttttttttttttt

SEQ ID NO: 1927 - DNA, 84 bp, synthetic construct
  source 1..84: mol_type = other DNA
tttttttaagcagtggtatcaacgcagagtacnngtgtatggnngtaggttcnntttttttttttttttttttttttttttttt

SEQ ID NO: 1928 - DNA, 84 bp, synthetic construct
  source 1..84: mol_type = other DNA
tttttttaagcagtggtatcaacgcagagtacnngtgtatggnngtatggacnntttttttttttttttttttttttttttttt

SEQ ID NO: 1929 - DNA, 84 bp, synthetic construct
  source 1..84: mol_type = other DNA
tttttttaagcagtggtatcaacgcagagtacnngtgtatggnntcgcaacanntttttttttttttttttttttttttttttt

SEQ ID NO: 1930 - DNA, 84 bp, synthetic construct
  source 1..84: mol_type = other DNA
tttttttaagcagtggtatcaacgcagagtacnngtgtatggnnccgctaatnntttttttttttttttttttttttttttttt

SEQ ID NO: 1931 - DNA, 84 bp, synthetic construct
  source 1..84: mol_type = other DNA
tttttttaagcagtggtatcaacgcagagtacnngtgtatggnngattcgcanntttttttttttttttttttttttttttttt

SEQ ID NO: 1932 - DNA, 84 bp, synthetic construct
  source 1..84: mol_type = other DNA
tttttttaagcagtggtatcaacgcagagtacnngtgtatggnncgatggaanntttttttttttttttttttttttttttttt

SEQ ID NO: 1933 - DNA, 84 bp, synthetic construct
  source 1..84: mol_type = other DNA
tttttttaagcagtggtatcaacgcagagtacnngtgtatggnnagcaagganntttttttttttttttttttttttttttttt

SEQ ID NO: 1934 - DNA, 84 bp, synthetic construct
  source 1..84: mol_type = other DNA
tttttttaagcagtggtatcaacgcagagtacnngtgtatggnncgtagcaanntttttttttttttttttttttttttttttt

SEQ ID NO: 1935 - DNA, 84 bp, synthetic construct
  source 1..84: mol_type = other DNA
tttttttaagcagtggtatcaacgcagagtacnngtgtatggnntggcagtanntttttttttttttttttttttttttttttt

SEQ ID NO: 1936 - DNA, 84 bp, synthetic construct
  source 1..84: mol_type = other DNA
tttttttaagcagtggtatcaacgcagagtacnngtgtatggnncggtagttnntttttttttttttttttttttttttttttt

SEQ ID NO: 1937 - DNA, 84 bp, synthetic construct
  source 1..84: mol_type = other DNA
tttttttaagcagtggtatcaacgcagagtacnngtgtatggnntgacttcgnntttttttttttttttttttttttttttttt

SEQ ID NO: 1938 - DNA, 84 bp, synthetic construct
  source 1..84: mol_type = other DNA
tttttttaagcagtggtatcaacgcagagtacnngtgtatggnngagtgcaanntttttttttttttttttttttttttttttt

SEQ ID NO: 1939 - DNA, 84 bp, synthetic construct
  source 1..84: mol_type = other DNA
tttttttaagcagtggtatcaacgcagagtacnngtgtatggnnacggtaacnntttttttttttttttttttttttttttttt

SEQ ID NO: 1940 - DNA, 84 bp, synthetic construct
  source 1..84: mol_type = other DNA
tttttttaagcagtggtatcaacgcagagtacnngtgtatggnnaagtggtgnntttttttttttttttttttttttttttttt

SEQ ID NO: 1941 - DNA, 84 bp, synthetic construct
  source 1..84: mol_type = other DNA
tttttttaagcagtggtatcaacgcagagtacnngtgtatggnnggagacaanntttttttttttttttttttttttttttttt

SEQ ID NO: 1942 - DNA, 84 bp, synthetic construct
  source 1..84: mol_type = other DNA
tttttttaagcagtggtatcaacgcagagtacnngtgtatggnntcaaggacnntttttttttttttttttttttttttttttt

SEQ ID NO: 1943 - DNA, 84 bp, synthetic construct
  source 1..84: mol_type = other DNA
tttttttaagcagtggtatcaacgcagagtacnngtgtatggnnaagagagcnntttttttttttttttttttttttttttttt

SEQ ID NO: 1944 - DNA, 84 bp, synthetic construct
  source 1..84: mol_type = other DNA
tttttttaagcagtggtatcaacgcagagtacnngtgtatggnncgagagatnntttttttttttttttttttttttttttttt

SEQ ID NO: 1945 - DNA, 84 bp, synthetic construct
  source 1..84: mol_type = other DNA
tttttttaagcagtggtatcaacgcagagtacnngtgtatggnnacagatggnntttttttttttttttttttttttttttttt

SEQ ID NO: 1946 - DNA, 84 bp, synthetic construct
  source 1..84: mol_type = other DNA
tttttttaagcagtggtatcaacgcagagtacnngtgtatggnnaggagtcanntttttttttttttttttttttttttttttt

SEQ ID NO: 1947 - DNA, 84 bp, synthetic construct
  source 1..84: mol_type = other DNA
tttttttaagcagtggtatcaacgcagagtacnngtgtatggnncgtgttacnntttttttttttttttttttttttttttttt

SEQ ID NO: 1948 - DNA, 84 bp, synthetic construct
  source 1..84: mol_type = other DNA
tttttttaagcagtggtatcaacgcagagtacnngtgtatggnntagtgtgcnntttttttttttttttttttttttttttttt

SEQ ID NO: 1949 - DNA, 84 bp, synthetic construct
  source 1..84: mol_type = other DNA
tttttttaagcagtggtatcaacgcagagtacnngtgtatggnnctcatgacnntttttttttttttttttttttttttttttt

SEQ ID NO: 1950 - DNA, 84 bp, synthetic construct
  source 1..84: mol_type = other DNA
tttttttaagcagtggtatcaacgcagagtacnngtgtatggnngtatccagnntttttttttttttttttttttttttttttt

SEQ ID NO: 1951 - DNA, 84 bp, synthetic construct
  source 1..84: mol_type = other DNA
tttttttaagcagtggtatcaacgcagagtacnngtgtatggnnacgcctatnntttttttttttttttttttttttttttttt

SEQ ID NO: 1952 - DNA, 84 bp, synthetic construct
  source 1..84: mol_type = other DNA
tttttttaagcagtggtatcaacgcagagtacnngtgtatggnnaacgacctnntttttttttttttttttttttttttttttt

SEQ ID NO: 1953 - DNA, 84 bp, synthetic construct
  source 1..84: mol_type = other DNA
tttttttaagcagtggtatcaacgcagagtacnngtgtatggnnatcaggctnntttttttttttttttttttttttttttttt

SEQ ID NO: 1954 - DNA, 84 bp, synthetic construct
  source 1..84: mol_type = other DNA
tttttttaagcagtggtatcaacgcagagtacnngtgtatggnncaagttcgnntttttttttttttttttttttttttttttt

SEQ ID NO: 1955 - DNA, 84 bp, synthetic construct
  source 1..84: mol_type = other DNA
tttttttaagcagtggtatcaacgcagagtacnngtgtatggnntagccaganntttttttttttttttttttttttttttttt

SEQ ID NO: 1956 - DNA, 84 bp, synthetic construct
  source 1..84: mol_type = other DNA
tttttttaagcagtggtatcaacgcagagtacnngtgtatggnncaatcacgnntttttttttttttttttttttttttttttt

SEQ ID NO: 1957 - DNA, 84 bp, synthetic construct
  source 1..84: mol_type = other DNA
tttttttaagcagtggtatcaacgcagagtacnngtgtatggnngcaacaagnntttttttttttttttttttttttttttttt

SEQ ID NO: 1958 - DNA, 84 bp, synthetic construct
  source 1..84: mol_type = other DNA
tttttttaagcagtggtatcaacgcagagtacnngtgtatggnncacgacaanntttttttttttttttttttttttttttttt

SEQ ID NO: 1959 - DNA, 84 bp, synthetic construct
  source 1..84: mol_type = other DNA
tttttttaagcagtggtatcaacgcagagtacnngtgtatggnntacggaganntttttttttttttttttttttttttttttt

SEQ ID NO: 1960 - DNA, 84 bp, synthetic construct
  source 1..84: mol_type = other DNA
tttttttaagcagtggtatcaacgcagagtacnngtgtatggnncgacaaganntttttttttttttttttttttttttttttt

SEQ ID NO: 1961 - DNA, 84 bp, synthetic construct
  source 1..84: mol_type = other DNA
tttttttaagcagtggtatcaacgcagagtacnngtgtatggnncgaagtganntttttttttttttttttttttttttttttt

SEQ ID NO: 1962 - DNA, 84 bp, synthetic construct
  source 1..84: mol_type = other DNA
tttttttaagcagtggtatcaacgcagagtacnngtgtatggnnagctggtanntttttttttttttttttttttttttttttt

SEQ ID NO: 1963 - DNA, 84 bp, synthetic construct
  source 1..84: mol_type = other DNA
tttttttaagcagtggtatcaacgcagagtacnngtgtatggnnaactaggcnntttttttttttttttttttttttttttttt

SEQ ID NO: 1964 - DNA, 84 bp, synthetic construct
  source 1..84: mol_type = other DNA
tttttttaagcagtggtatcaacgcagagtacnngtgtatggnncagcaagtnntttttttttttttttttttttttttttttt

SEQ ID NO: 1965 - DNA, 84 bp, synthetic construct
  source 1..84: mol_type = other DNA
tttttttaagcagtggtatcaacgcagagtacnngtgtatggnnacgaggtanntttttttttttttttttttttttttttttt

SEQ ID NO: 1966 - DNA, 84 bp, synthetic construct
  source 1..84: mol_type = other DNA
tttttttaagcagtggtatcaacgcagagtacnngtgtatggnncatcttccnntttttttttttttttttttttttttttttt

SEQ ID NO: 1967 - DNA, 84 bp, synthetic construct
  source 1..84: mol_type = other DNA
tttttttaagcagtggtatcaacgcagagtacnngtgtatggnncctgaatcnntttttttttttttttttttttttttttttt

SEQ ID NO: 1968 - DNA, 84 bp, synthetic construct
  source 1..84: mol_type = other DNA
tttttttaagcagtggtatcaacgcagagtacnngtgtatggnntgcagactnntttttttttttttttttttttttttttttt

SEQ ID NO: 1969 - DNA, 84 bp, synthetic construct
  source 1..84: mol_type = other DNA
tttttttaagcagtggtatcaacgcagagtacnngtgtatggnnagatgtggnntttttttttttttttttttttttttttttt

SEQ ID NO: 1970 - DNA, 84 bp, synthetic construct
  source 1..84: mol_type = other DNA
tttttttaagcagtggtatcaacgcagagtacnngtgtatggnnagttcgacnntttttttttttttttttttttttttttttt

SEQ ID NO: 1971 - DNA, 84 bp, synthetic construct
  source 1..84: mol_type = other DNA
tttttttaagcagtggtatcaacgcagagtacnngtgtatggnnacaacctcnntttttttttttttttttttttttttttttt

SEQ ID NO: 1972 - DNA, 84 bp, synthetic construct
  source 1..84: mol_type = other DNA
tttttttaagcagtggtatcaacgcagagtacnngtgtatggnncatggtagnntttttttttttttttttttttttttttttt

SEQ ID NO: 1973 - DNA, 84 bp, synthetic construct
  source 1..84: mol_type = other DNA
tttttttaagcagtggtatcaacgcagagtacnngtgtatggnncgtatctcnntttttttttttttttttttttttttttttt

SEQ ID NO: 1974 - DNA, 84 bp, synthetic construct
  source 1..84: mol_type = other DNA
tttttttaagcagtggtatcaacgcagagtacnngtgtatggnncctagttcnntttttttttttttttttttttttttttttt

SEQ ID NO: 1975 - DNA, 84 bp, synthetic construct
  source 1..84: mol_type = other DNA
tttttttaagcagtggtatcaacgcagagtacnngtgtatggnncaagagtcnntttttttttttttttttttttttttttttt

SEQ ID NO: 1976 - DNA, 84 bp, synthetic construct
  source 1..84: mol_type = other DNA
tttttttaagcagtggtatcaacgcagagtacnnccggttaannaatcggcanntttttttttttttttttttttttttttttt

SEQ ID NO: 1977 - DNA, 84 bp, synthetic construct
  source 1..84: mol_type = other DNA
tttttttaagcagtggtatcaacgcagagtacnnccggttaanntacggcatnntttttttttttttttttttttttttttttt

SEQ ID NO: 1978 - DNA, 84 bp, synthetic construct
  source 1..84: mol_type = other DNA
tttttttaagcagtggtatcaacgcagagtacnnccggttaannttggatcgnntttttttttttttttttttttttttttttt

SEQ ID NO: 1979 - DNA, 84 bp, synthetic construct
  source 1..84: mol_type = other DNA
tttttttaagcagtggtatcaacgcagagtacnnccggttaanntggaacganntttttttttttttttttttttttttttttt

SEQ ID NO: 1980 - DNA, 84 bp, synthetic construct
  source 1..84: mol_type = other DNA
tttttttaagcagtggtatcaacgcagagtacnnccggttaannggcaatcanntttttttttttttttttttttttttttttt

SEQ ID NO: 1981 - DNA, 84 bp, synthetic construct
  source 1..84: mol_type = other DNA
tttttttaagcagtggtatcaacgcagagtacnnccggttaanngaatccganntttttttttttttttttttttttttttttt

SEQ ID NO: 1982 - DNA, 84 bp, synthetic construct
  source 1..84: mol_type = other DNA
tttttttaagcagtggtatcaacgcagagtacnnccggttaannttacggtgnntttttttttttttttttttttttttttttt

SEQ ID NO: 1983 - DNA, 84 bp, synthetic construct
  source 1..84: mol_type = other DNA
tttttttaagcagtggtatcaacgcagagtacnnccggttaanncatatcggnntttttttttttttttttttttttttttttt

SEQ ID NO: 1984 - DNA, 84 bp, synthetic construct
  source 1..84: mol_type = other DNA
tttttttaagcagtggtatcaacgcagagtacnnccggttaanncttcggtanntttttttttttttttttttttttttttttt

SEQ ID NO: 1985 - DNA, 84 bp, synthetic construct
  source 1..84: mol_type = other DNA
tttttttaagcagtggtatcaacgcagagtacnnccggttaanntcctaacgnntttttttttttttttttttttttttttttt

SEQ ID NO: 1986 - DNA, 84 bp, synthetic construct
  source 1..84: mol_type = other DNA
tttttttaagcagtggtatcaacgcagagtacnnccggttaanngtaagccanntttttttttttttttttttttttttttttt

SEQ ID NO: 1987 - DNA, 84 bp, synthetic construct
  source 1..84: mol_type = other DNA
tttttttaagcagtggtatcaacgcagagtacnnccggttaanntaaggtggnntttttttttttttttttttttttttttttt

SEQ ID NO: 1988 - DNA, 84 bp, synthetic construct
  source 1..84: mol_type = other DNA
tttttttaagcagtggtatcaacgcagagtacnnccggttaannggtaagctnntttttttttttttttttttttttttttttt

SEQ ID NO: 1989 - DNA, 84 bp, synthetic construct
  source 1..84: mol_type = other DNA
tttttttaagcagtggtatcaacgcagagtacnnccggttaanntgtgtcganntttttttttttttttttttttttttttttt

SEQ ID NO: 1990 - DNA, 84 bp, synthetic construct
  source 1..84: mol_type = other DNA
tttttttaagcagtggtatcaacgcagagtacnnccggttaanngagcatganntttttttttttttttttttttttttttttt

SEQ ID NO: 1991 - DNA, 84 bp, synthetic construct
  source 1..84: mol_type = other DNA
tttttttaagcagtggtatcaacgcagagtacnnccggttaanntcgaagtcnntttttttttttttttttttttttttttttt

SEQ ID NO: 1992 - DNA, 84 bp, synthetic construct
  source 1..84: mol_type = other DNA
tttttttaagcagtggtatcaacgcagagtacnnccggttaannggtgaacanntttttttttttttttttttttttttttttt

SEQ ID NO: 1993 - DNA, 84 bp, synthetic construct
  source 1..84: mol_type = other DNA
tttttttaagcagtggtatcaacgcagagtacnnccggttaannacatgcacnntttttttttttttttttttttttttttttt

SEQ ID NO: 1994 - DNA, 84 bp, synthetic construct
  source 1..84: mol_type = other DNA
tttttttaagcagtggtatcaacgcagagtacnnccggttaannccaacagtnntttttttttttttttttttttttttttttt

SEQ ID NO: 1995 - DNA, 84 bp, synthetic construct
  source 1..84: mol_type = other DNA
tttttttaagcagtggtatcaacgcagagtacnnccggttaannagaacagcnntttttttttttttttttttttttttttttt

SEQ ID NO: 1996 - DNA, 84 bp, synthetic construct
  source 1..84: mol_type = other DNA
tttttttaagcagtggtatcaacgcagagtacnnccggttaanngaacacgtnntttttttttttttttttttttttttttttt

SEQ ID NO: 1997 - DNA, 84 bp, synthetic construct
  source 1..84: mol_type = other DNA
tttttttaagcagtggtatcaacgcagagtacnnccggttaannggtcttcanntttttttttttttttttttttttttttttt

SEQ ID NO: 1998 - DNA, 84 bp, synthetic construct
  source 1..84: mol_type = other DNA
tttttttaagcagtggtatcaacgcagagtacnnccggttaannaggttcagnntttttttttttttttttttttttttttttt

SEQ ID NO: 1999 - DNA, 84 bp, synthetic construct
  source 1..84: mol_type = other DNA
tttttttaagcagtggtatcaacgcagagtacnnccggttaannctagagcanntttttttttttttttttttttttttttttt

SEQ ID NO: 2000 - DNA, 84 bp, synthetic construct
  source 1..84: mol_type = other DNA
tttttttaagcagtggtatcaacgcagagtacnnccggttaanncttctagcnntttttttttttttttttttttttttttttt

SEQ ID NO: 2001 - DNA, 84 bp, synthetic construct
  source 1..84: mol_type = other DNA
tttttttaagcagtggtatcaacgcagagtacnnccggttaanngagtaacgnntttttttttttttttttttttttttttttt

SEQ ID NO: 2002 - DNA, 84 bp, synthetic construct
  source 1..84: mol_type = other DNA
tttttttaagcagtggtatcaacgcagagtacnnccggttaannctaagaggnntttttttttttttttttttttttttttttt

SEQ ID NO: 2003 - DNA, 84 bp, synthetic construct
  source 1..84: mol_type = other DNA
tttttttaagcagtggtatcaacgcagagtacnnccggttaannacgtgtagnntttttttttttttttttttttttttttttt

SEQ ID NO: 2004 - DNA, 84 bp, synthetic construct
  source 1..84: mol_type = other DNA
tttttttaagcagtggtatcaacgcagagtacnnccggttaannactacaggnntttttttttttttttttttttttttttttt

SEQ ID NO: 2005 - DNA, 84 bp, synthetic construct
  source 1..84: mol_type = other DNA
tttttttaagcagtggtatcaacgcagagtacnnccggttaanntacaggtcnntttttttttttttttttttttttttttttt

SEQ ID NO: 2006 - DNA, 84 bp, synthetic construct
  source 1..84: mol_type = other DNA
tttttttaagcagtggtatcaacgcagagtacnnccggttaannctcacatgnntttttttttttttttttttttttttttttt

SEQ ID NO: 2007 - DNA, 84 bp, synthetic construct
  source 1..84: mol_type = other DNA
tttttttaagcagtggtatcaacgcagagtacnnccggttaannactaggagnntttttttttttttttttttttttttttttt

SEQ ID NO: 2008 - DNA, 84 bp, synthetic construct
  source 1..84: mol_type = other DNA
tttttttaagcagtggtatcaacgcagagtacnnccggttaannccatagganntttttttttttttttttttttttttttttt

SEQ ID NO: 2009 - DNA, 84 bp, synthetic construct
  source 1..84: mol_type = other DNA
tttttttaagcagtggtatcaacgcagagtacnnccggttaannggagaatcnntttttttttttttttttttttttttttttt

SEQ ID NO: 2010 - DNA, 84 bp, synthetic construct
  source 1..84: mol_type = other DNA
tttttttaagcagtggtatcaacgcagagtacnnccggttaanngccaagaanntttttttttttttttttttttttttttttt

SEQ ID NO: 2011 - DNA, 84 bp, synthetic construct
  source 1..84: mol_type = other DNA
tttttttaagcagtggtatcaacgcagagtacnnccggttaannaaggcaagnntttttttttttttttttttttttttttttt

SEQ ID NO: 2012 - DNA, 84 bp, synthetic construct
  source 1..84: mol_type = other DNA
tttttttaagcagtggtatcaacgcagagtacnnccggttaannaatgtcgcnntttttttttttttttttttttttttttttt

SEQ ID NO: 2013 - DNA, 84 bp, synthetic construct
  source 1..84: mol_type = other DNA
tttttttaagcagtggtatcaacgcagagtacnnccggttaannatggaaccnntttttttttttttttttttttttttttttt

SEQ ID NO: 2014 - DNA, 84 bp, synthetic construct
  source 1..84: mol_type = other DNA
tttttttaagcagtggtatcaacgcagagtacnnccggttaannagaggcatnntttttttttttttttttttttttttttttt

SEQ ID NO: 2015 - DNA, 84 bp, synthetic construct
  source 1..84: mol_type = other DNA
tttttttaagcagtggtatcaacgcagagtacnnccggttaanntgcatagcnntttttttttttttttttttttttttttttt

SEQ ID NO: 2016 - DNA, 84 bp, synthetic construct
  source 1..84: mol_type = other DNA
tttttttaagcagtggtatcaacgcagagtacnnccggttaannctaacgganntttttttttttttttttttttttttttttt

SEQ ID NO: 2017 - DNA, 84 bp, synthetic construct
  source 1..84: mol_type = other DNA
tttttttaagcagtggtatcaacgcagagtacnnccggttaanntatcgaggnntttttttttttttttttttttttttttttt

SEQ ID NO: 2018 - DNA, 84 bp, synthetic construct
  source 1..84: mol_type = other DNA
tttttttaagcagtggtatcaacgcagagtacnnccggttaanncatagcctnntttttttttttttttttttttttttttttt

SEQ ID NO: 2019 - DNA, 84 bp, synthetic construct
  source 1..84: mol_type = other DNA
tttttttaagcagtggtatcaacgcagagtacnnccggttaannatcgagacnntttttttttttttttttttttttttttttt

SEQ ID NO: 2020 - DNA, 84 bp, synthetic construct
  source 1..84: mol_type = other DNA
tttttttaagcagtggtatcaacgcagagtacnnccggttaannggaagagtnntttttttttttttttttttttttttttttt

SEQ ID NO: 2021 - DNA, 84 bp, synthetic construct
  source 1..84: mol_type = other DNA
tttttttaagcagtggtatcaacgcagagtacnnccggttaannccaagtagnntttttttttttttttttttttttttttttt

SEQ ID NO: 2022 - DNA, 84 bp, synthetic construct
  source 1..84: mol_type = other DNA
tttttttaagcagtggtatcaacgcagagtacnnccggttaannctgaacagnntttttttttttttttttttttttttttttt

SEQ ID NO: 2023 - DNA, 84 bp, synthetic construct
  source 1..84: mol_type = other DNA
tttttttaagcagtggtatcaacgcagagtacnnccggttaanngtaggttcnntttttttttttttttttttttttttttttt

SEQ ID NO: 2024 - DNA, 84 bp, synthetic construct
  source 1..84: mol_type = other DNA
tttttttaagcagtggtatcaacgcagagtacnnccggttaanngtatggacnntttttttttttttttttttttttttttttt

SEQ ID NO: 2025 - DNA, 84 bp, synthetic construct
  source 1..84: mol_type = other DNA
tttttttaagcagtggtatcaacgcagagtacnnccggttaanntcgcaacanntttttttttttttttttttttttttttttt

SEQ ID NO: 2026 - DNA, 84 bp, synthetic construct
  source 1..84: mol_type = other DNA
tttttttaagcagtggtatcaacgcagagtacnnccggttaannccgctaatnntttttttttttttttttttttttttttttt

SEQ ID NO: 2027 - DNA, 84 bp, synthetic construct
  source 1..84: mol_type = other DNA
tttttttaagcagtggtatcaacgcagagtacnnccggttaanngattcgcanntttttttttttttttttttttttttttttt

SEQ ID NO: 2028 - DNA, 84 bp, synthetic construct
  source 1..84: mol_type = other DNA
tttttttaagcagtggtatcaacgcagagtacnnccggttaanncgatggaanntttttttttttttttttttttttttttttt

SEQ ID NO: 2029 - DNA, 84 bp, synthetic construct
  source 1..84: mol_type = other DNA
tttttttaagcagtggtatcaacgcagagtacnnccggttaannagcaagganntttttttttttttttttttttttttttttt

SEQ ID NO: 2030 - DNA, 84 bp, synthetic construct
  source 1..84: mol_type = other DNA
tttttttaagcagtggtatcaacgcagagtacnnccggttaanncgtagcaanntttttttttttttttttttttttttttttt

SEQ ID NO: 2031 - DNA, 84 bp, synthetic construct
  source 1..84: mol_type = other DNA
tttttttaagcagtggtatcaacgcagagtacnnccggttaanntggcagtanntttttttttttttttttttttttttttttt

SEQ ID NO: 2032 - DNA, 84 bp, synthetic construct
  source 1..84: mol_type = other DNA
tttttttaagcagtggtatcaacgcagagtacnnccggttaanncggtagttnntttttttttttttttttttttttttttttt

SEQ ID NO: 2033 - DNA, 84 bp, synthetic construct
  source 1..84: mol_type = other DNA
tttttttaagcagtggtatcaacgcagagtacnnccggttaanntgacttcgnntttttttttttttttttttttttttttttt

SEQ ID NO: 2034 - DNA, 84 bp, synthetic construct
  source 1..84: mol_type = other DNA
tttttttaagcagtggtatcaacgcagagtacnnccggttaanngagtgcaanntttttttttttttttttttttttttttttt

SEQ ID NO: 2035 - DNA, 84 bp, synthetic construct
  source 1..84: mol_type = other DNA
tttttttaagcagtggtatcaacgcagagtacnnccggttaannacggtaacnntttttttttttttttttttttttttttttt

SEQ ID NO: 2036 - DNA, 84 bp, synthetic construct
  source 1..84: mol_type = other DNA
tttttttaagcagtggtatcaacgcagagtacnnccggttaannaagtggtgnntttttttttttttttttttttttttttttt

SEQ ID NO: 2037 - DNA, 84 bp, synthetic construct
  source 1..84: mol_type = other DNA
tttttttaagcagtggtatcaacgcagagtacnnccggttaannggagacaanntttttttttttttttttttttttttttttt

SEQ ID NO: 2038 - DNA, 84 bp, synthetic construct
  source 1..84: mol_type = other DNA
tttttttaagcagtggtatcaacgcagagtacnnccggttaanntcaaggacnntttttttttttttttttttttttttttttt

SEQ ID NO: 2039 - DNA, 84 bp, synthetic construct
  source 1..84: mol_type = other DNA
tttttttaagcagtggtatcaacgcagagtacnnccggttaannaagagagcnntttttttttttttttttttttttttttttt

SEQ ID NO: 2040 - DNA, 84 bp, synthetic construct
  source 1..84: mol_type = other DNA
tttttttaagcagtggtatcaacgcagagtacnnccggttaanncgagagatnntttttttttttttttttttttttttttttt

SEQ ID NO: 2041 - DNA, 84 bp, synthetic construct
  source 1..84: mol_type = other DNA
tttttttaagcagtggtatcaacgcagagtacnnccggttaannacagatggnntttttttttttttttttttttttttttttt

SEQ ID NO: 2042 - DNA, 84 bp, synthetic construct
  source 1..84: mol_type = other DNA
tttttttaagcagtggtatcaacgcagagtacnnccggttaannaggagtcanntttttttttttttttttttttttttttttt

SEQ ID NO: 2043 - DNA, 84 bp, synthetic construct
  source 1..84: mol_type = other DNA
tttttttaagcagtggtatcaacgcagagtacnnccggttaanncgtgttacnntttttttttttttttttttttttttttttt

SEQ ID NO: 2044 - DNA, 84 bp, synthetic construct
  source 1..84: mol_type = other DNA
tttttttaagcagtggtatcaacgcagagtacnnccggttaanntagtgtgcnntttttttttttttttttttttttttttttt

SEQ ID NO: 2045 - DNA, 84 bp, synthetic construct
  source 1..84: mol_type = other DNA
tttttttaagcagtggtatcaacgcagagtacnnccggttaannctcatgacnntttttttttttttttttttttttttttttt

SEQ ID NO: 2046 - DNA, 84 bp, synthetic construct
  source 1..84: mol_type = other DNA
tttttttaagcagtggtatcaacgcagagtacnnccggttaanngtatccagnntttttttttttttttttttttttttttttt

SEQ ID NO: 2047 - DNA, 84 bp, synthetic construct
  source 1..84: mol_type = other DNA
tttttttaagcagtggtatcaacgcagagtacnnccggttaannacgcctatnntttttttttttttttttttttttttttttt

SEQ ID NO: 2048 - DNA, 84 bp, synthetic construct
  source 1..84: mol_type = other DNA
tttttttaagcagtggtatcaacgcagagtacnnccggttaannaacgacctnntttttttttttttttttttttttttttttt

SEQ ID NO: 2049 - DNA, 84 bp, synthetic construct
  source 1..84: mol_type = other DNA
tttttttaagcagtggtatcaacgcagagtacnnccggttaannatcaggctnntttttttttttttttttttttttttttttt

SEQ ID NO: 2050 - DNA, 84 bp, synthetic construct
  source 1..84: mol_type = other DNA
tttttttaagcagtggtatcaacgcagagtacnnccggttaanncaagttcgnntttttttttttttttttttttttttttttt

SEQ ID NO: 2051 - DNA, 84 bp, synthetic construct
  source 1..84: mol_type = other DNA
tttttttaagcagtggtatcaacgcagagtacnnccggttaanntagccaganntttttttttttttttttttttttttttttt

SEQ ID NO: 2052 - DNA, 84 bp, synthetic construct
  source 1..84: mol_type = other DNA
tttttttaagcagtggtatcaacgcagagtacnnccggttaanncaatcacgnntttttttttttttttttttttttttttttt

SEQ ID NO: 2053 - DNA, 84 bp, synthetic construct
  source 1..84: mol_type = other DNA
tttttttaagcagtggtatcaacgcagagtacnnccggttaanngcaacaagnntttttttttttttttttttttttttttttt

SEQ ID NO: 2054 - DNA, 84 bp, synthetic construct
  source 1..84: mol_type = other DNA
tttttttaagcagtggtatcaacgcagagtacnnccggttaanncacgacaanntttttttttttttttttttttttttttttt

SEQ ID NO: 2055 - DNA, 84 bp, synthetic construct
  source 1..84: mol_type = other DNA
tttttttaagcagtggtatcaacgcagagtacnnccggttaanntacggaganntttttttttttttttttttttttttttttt

SEQ ID NO: 2056 - DNA, 84 bp, synthetic construct
  source 1..84: mol_type = other DNA
tttttttaagcagtggtatcaacgcagagtacnnccggttaanncgacaaganntttttttttttttttttttttttttttttt

SEQ ID NO: 2057 - DNA, 84 bp, synthetic construct
  source 1..84: mol_type = other DNA
tttttttaagcagtggtatcaacgcagagtacnnccggttaanncgaagtganntttttttttttttttttttttttttttttt

SEQ ID NO: 2058 - DNA, 84 bp, synthetic construct
  source 1..84: mol_type = other DNA
tttttttaagcagtggtatcaacgcagagtacnnccggttaannagctggtanntttttttttttttttttttttttttttttt

SEQ ID NO: 2059 - DNA, 84 bp, synthetic construct
  source 1..84: mol_type = other DNA
tttttttaagcagtggtatcaacgcagagtacnnccggttaannaactaggcnntttttttttttttttttttttttttttttt

SEQ ID NO: 2060 - DNA, 84 bp, synthetic construct
  source 1..84: mol_type = other DNA
tttttttaagcagtggtatcaacgcagagtacnnccggttaanncagcaagtnntttttttttttttttttttttttttttttt

SEQ ID NO: 2061 - DNA, 84 bp, synthetic construct
  source 1..84: mol_type = other DNA
tttttttaagcagtggtatcaacgcagagtacnnccggttaannacgaggtanntttttttttttttttttttttttttttttt

SEQ ID NO: 2062 - DNA, 84 bp, synthetic construct
  source 1..84: mol_type = other DNA
tttttttaagcagtggtatcaacgcagagtacnnccggttaanncatcttccnntttttttttttttttttttttttttttttt

SEQ ID NO: 2063 - DNA, 84 bp, synthetic construct
  source 1..84: mol_type = other DNA
tttttttaagcagtggtatcaacgcagagtacnnccggttaanncctgaatcnntttttttttttttttttttttttttttttt

SEQ ID NO: 2064 - DNA, 84 bp, synthetic construct
  source 1..84: mol_type = other DNA
tttttttaagcagtggtatcaacgcagagtacnnccggttaanntgcagactnntttttttttttttttttttttttttttttt

SEQ ID NO: 2065 - DNA, 84 bp, synthetic construct
  source 1..84: mol_type = other DNA
tttttttaagcagtggtatcaacgcagagtacnnccggttaannagatgtggnntttttttttttttttttttttttttttttt

SEQ ID NO: 2066 - DNA, 84 bp, synthetic construct
  source 1..84: mol_type = other DNA
tttttttaagcagtggtatcaacgcagagtacnnccggttaannagttcgacnntttttttttttttttttttttttttttttt

SEQ ID NO: 2067 - DNA, 84 bp, synthetic construct
  source 1..84: mol_type = other DNA
tttttttaagcagtggtatcaacgcagagtacnnccggttaannacaacctcnntttttttttttttttttttttttttttttt

SEQ ID NO: 2068 - DNA, 84 bp, synthetic construct
  source 1..84: mol_type = other DNA
tttttttaagcagtggtatcaacgcagagtacnnccggttaanncatggtagnntttttttttttttttttttttttttttttt

SEQ ID NO: 2069 - DNA, 84 bp, synthetic construct
  source 1..84: mol_type = other DNA
tttttttaagcagtggtatcaacgcagagtacnnccggttaanncgtatctcnntttttttttttttttttttttttttttttt

SEQ ID NO: 2070 - DNA, 84 bp, synthetic construct
  source 1..84: mol_type = other DNA
tttttttaagcagtggtatcaacgcagagtacnnccggttaanncctagttcnntttttttttttttttttttttttttttttt

SEQ ID NO: 2071 - DNA, 84 bp, synthetic construct
  source 1..84: mol_type = other DNA
tttttttaagcagtggtatcaacgcagagtacnnccggttaanncaagagtcnntttttttttttttttttttttttttttttt

SEQ ID NO: 2072 - DNA, 84 bp, synthetic construct
  source 1..84: mol_type = other DNA
tttttttaagcagtggtatcaacgcagagtacnnttgttcggnnaatcggcanntttttttttttttttttttttttttttttt

SEQ ID NO: 2073 - DNA, 84 bp, synthetic construct
  source 1..84: mol_type = other DNA
tttttttaagcagtggtatcaacgcagagtacnnttgttcggnntacggcatnntttttttttttttttttttttttttttttt

SEQ ID NO: 2074 - DNA, 84 bp, synthetic construct
  source 1..84: mol_type = other DNA
tttttttaagcagtggtatcaacgcagagtacnnttgttcggnnttggatcgnntttttttttttttttttttttttttttttt

SEQ ID NO: 2075 - DNA, 84 bp, synthetic construct
  source 1..84: mol_type = other DNA
tttttttaagcagtggtatcaacgcagagtacnnttgttcggnntggaacganntttttttttttttttttttttttttttttt

SEQ ID NO: 2076 - DNA, 84 bp, synthetic construct
  source 1..84: mol_type = other DNA
tttttttaagcagtggtatcaacgcagagtacnnttgttcggnnggcaatcanntttttttttttttttttttttttttttttt

SEQ ID NO: 2077 - DNA, 84 bp, synthetic construct
  source 1..84: mol_type = other DNA
tttttttaagcagtggtatcaacgcagagtacnnttgttcggnngaatccganntttttttttttttttttttttttttttttt

SEQ ID NO: 2078 - DNA, 84 bp, synthetic construct
  source 1..84: mol_type = other DNA
tttttttaagcagtggtatcaacgcagagtacnnttgttcggnnttacggtgnntttttttttttttttttttttttttttttt

SEQ ID NO: 2079 - DNA, 84 bp, synthetic construct
  source 1..84: mol_type = other DNA
tttttttaagcagtggtatcaacgcagagtacnnttgttcggnncatatcggnntttttttttttttttttttttttttttttt

SEQ ID NO: 2080 - DNA, 84 bp, synthetic construct
  source 1..84: mol_type = other DNA
tttttttaagcagtggtatcaacgcagagtacnnttgttcggnncttcggtanntttttttttttttttttttttttttttttt

SEQ ID NO: 2081 - DNA, 84 bp, synthetic construct
  source 1..84: mol_type = other DNA
tttttttaagcagtggtatcaacgcagagtacnnttgttcggnntcctaacgnntttttttttttttttttttttttttttttt

SEQ ID NO: 2082 - DNA, 84 bp, synthetic construct
  source 1..84: mol_type = other DNA
tttttttaagcagtggtatcaacgcagagtacnnttgttcggnngtaagccanntttttttttttttttttttttttttttttt

SEQ ID NO: 2083 - DNA, 84 bp, synthetic construct
  source 1..84: mol_type = other DNA
tttttttaagcagtggtatcaacgcagagtacnnttgttcggnntaaggtggnntttttttttttttttttttttttttttttt

SEQ ID NO: 2084 - DNA, 84 bp, synthetic construct
  source 1..84: mol_type = other DNA
tttttttaagcagtggtatcaacgcagagtacnnttgttcggnnggtaagctnntttttttttttttttttttttttttttttt

SEQ ID NO: 2085 - DNA, 84 bp, synthetic construct
  source 1..84: mol_type = other DNA
tttttttaagcagtggtatcaacgcagagtacnnttgttcggnntgtgtcganntttttttttttttttttttttttttttttt

SEQ ID NO: 2086 - DNA, 84 bp, synthetic construct
  source 1..84: mol_type = other DNA
tttttttaagcagtggtatcaacgcagagtacnnttgttcggnngagcatganntttttttttttttttttttttttttttttt

SEQ ID NO: 2087 - DNA, 84 bp, synthetic construct
  source 1..84: mol_type = other DNA
tttttttaagcagtggtatcaacgcagagtacnnttgttcggnntcgaagtcnntttttttttttttttttttttttttttttt

SEQ ID NO: 2088 - DNA, 84 bp, synthetic construct
  source 1..84: mol_type = other DNA
tttttttaagcagtggtatcaacgcagagtacnnttgttcggnnggtgaacanntttttttttttttttttttttttttttttt

SEQ ID NO: 2089 - DNA, 84 bp, synthetic construct
  source 1..84: mol_type = other DNA
tttttttaagcagtggtatcaacgcagagtacnnttgttcggnnacatgcacnntttttttttttttttttttttttttttttt

SEQ ID NO: 2090 - DNA, 84 bp, synthetic construct
  source 1..84: mol_type = other DNA
tttttttaagcagtggtatcaacgcagagtacnnttgttcggnnccaacagtnntttttttttttttttttttttttttttttt

SEQ ID NO: 2091 - DNA, 84 bp, synthetic construct
  source 1..84: mol_type = other DNA
tttttttaagcagtggtatcaacgcagagtacnnttgttcggnnagaacagcnntttttttttttttttttttttttttttttt

SEQ ID NO: 2092 - DNA, 84 bp, synthetic construct
  source 1..84: mol_type = other DNA
tttttttaagcagtggtatcaacgcagagtacnnttgttcggnngaacacgtnntttttttttttttttttttttttttttttt

SEQ ID NO: 2093 - DNA, 84 bp, synthetic construct
  source 1..84: mol_type = other DNA
tttttttaagcagtggtatcaacgcagagtacnnttgttcggnnggtcttcanntttttttttttttttttttttttttttttt

SEQ ID NO: 2094 - DNA, 84 bp, synthetic construct
  source 1..84: mol_type = other DNA
tttttttaagcagtggtatcaacgcagagtacnnttgttcggnnaggttcagnntttttttttttttttttttttttttttttt

SEQ ID NO: 2095 - DNA, 84 bp, synthetic construct
  source 1..84: mol_type = other DNA
tttttttaagcagtggtatcaacgcagagtacnnttgttcggnnctagagcanntttttttttttttttttttttttttttttt

SEQ ID NO: 2096 - DNA, 84 bp, synthetic construct
  source 1..84: mol_type = other DNA
tttttttaagcagtggtatcaacgcagagtacnnttgttcggnncttctagcnntttttttttttttttttttttttttttttt

SEQ ID NO: 2097 - DNA, 84 bp, synthetic construct
  source 1..84: mol_type = other DNA
tttttttaagcagtggtatcaacgcagagtacnnttgttcggnngagtaacgnntttttttttttttttttttttttttttttt

SEQ ID NO: 2098 - DNA, 84 bp, synthetic construct
  source 1..84: mol_type = other DNA
tttttttaagcagtggtatcaacgcagagtacnnttgttcggnnctaagaggnntttttttttttttttttttttttttttttt

SEQ ID NO: 2099 - DNA, 84 bp, synthetic construct
  source 1..84: mol_type = other DNA
tttttttaagcagtggtatcaacgcagagtacnnttgttcggnnacgtgtagnntttttttttttttttttttttttttttttt

SEQ ID NO: 2100 - DNA, 84 bp, synthetic construct
  source 1..84: mol_type = other DNA
tttttttaagcagtggtatcaacgcagagtacnnttgttcggnnactacaggnntttttttttttttttttttttttttttttt

SEQ ID NO: 2101 - DNA, 84 bp, synthetic construct
  source 1..84: mol_type = other DNA
tttttttaagcagtggtatcaacgcagagtacnnttgttcggnntacaggtcnntttttttttttttttttttttttttttttt

SEQ ID NO: 2102 - DNA, 84 bp, synthetic construct
  source 1..84: mol_type = other DNA
tttttttaagcagtggtatcaacgcagagtacnnttgttcggnnctcacatgnntttttttttttttttttttttttttttttt

SEQ ID NO: 2103 - DNA, 84 bp, synthetic construct
  source 1..84: mol_type = other DNA
tttttttaagcagtggtatcaacgcagagtacnnttgttcggnnactaggagnntttttttttttttttttttttttttttttt

SEQ ID NO: 2104 - DNA, 84 bp, synthetic construct
  source 1..84: mol_type = other DNA
tttttttaagcagtggtatcaacgcagagtacnnttgttcggnnccatagganntttttttttttttttttttttttttttttt

SEQ ID NO: 2105 - DNA, 84 bp, synthetic construct
  source 1..84: mol_type = other DNA
tttttttaagcagtggtatcaacgcagagtacnnttgttcggnnggagaatcnntttttttttttttttttttttttttttttt

SEQ ID NO: 2106 - DNA, 84 bp, synthetic construct
  source 1..84: mol_type = other DNA
tttttttaagcagtggtatcaacgcagagtacnnttgttcggnngccaagaanntttttttttttttttttttttttttttttt

SEQ ID NO: 2107 - DNA, 84 bp, synthetic construct
  source 1..84: mol_type = other DNA
tttttttaagcagtggtatcaacgcagagtacnnttgttcggnnaaggcaagnntttttttttttttttttttttttttttttt

SEQ ID NO: 2108 - DNA, 84 bp, synthetic construct
  source 1..84: mol_type = other DNA
tttttttaagcagtggtatcaacgcagagtacnnttgttcggnnaatgtcgcnntttttttttttttttttttttttttttttt

SEQ ID NO: 2109 - DNA, 84 bp, synthetic construct
  source 1..84: mol_type = other DNA
tttttttaagcagtggtatcaacgcagagtacnnttgttcggnnatggaaccnntttttttttttttttttttttttttttttt

SEQ ID NO: 2110 - DNA, 84 bp, synthetic construct
  source 1..84: mol_type = other DNA
tttttttaagcagtggtatcaacgcagagtacnnttgttcggnnagaggcatnntttttttttttttttttttttttttttttt

SEQ ID NO: 2111 - DNA, 84 bp, synthetic construct
  source 1..84: mol_type = other DNA
tttttttaagcagtggtatcaacgcagagtacnnttgttcggnntgcatagcnntttttttttttttttttttttttttttttt

SEQ ID NO: 2112 - DNA, 84 bp, synthetic construct
  source 1..84: mol_type = other DNA
tttttttaagcagtggtatcaacgcagagtacnnttgttcggnnctaacgganntttttttttttttttttttttttttttttt

SEQ ID NO: 2113 - DNA, 84 bp, synthetic construct
  source 1..84: mol_type = other DNA
tttttttaagcagtggtatcaacgcagagtacnnttgttcggnntatcgaggnntttttttttttttttttttttttttttttt

SEQ ID NO: 2114 - DNA, 84 bp, synthetic construct
  source 1..84: mol_type = other DNA
tttttttaagcagtggtatcaacgcagagtacnnttgttcggnncatagcctnntttttttttttttttttttttttttttttt

SEQ ID NO: 2115 - DNA, 84 bp, synthetic construct
  source 1..84: mol_type = other DNA
tttttttaagcagtggtatcaacgcagagtacnnttgttcggnnatcgagacnntttttttttttttttttttttttttttttt

SEQ ID NO: 2116 - DNA, 84 bp, synthetic construct
  source 1..84: mol_type = other DNA
tttttttaagcagtggtatcaacgcagagtacnnttgttcggnnggaagagtnntttttttttttttttttttttttttttttt

SEQ ID NO: 2117 - DNA, 84 bp, synthetic construct
  source 1..84: mol_type = other DNA
tttttttaagcagtggtatcaacgcagagtacnnttgttcggnnccaagtagnntttttttttttttttttttttttttttttt

SEQ ID NO: 2118 - DNA, 84 bp, synthetic construct
  source 1..84: mol_type = other DNA
tttttttaagcagtggtatcaacgcagagtacnnttgttcggnnctgaacagnntttttttttttttttttttttttttttttt

SEQ ID NO: 2119 - DNA, 84 bp, synthetic construct
  source 1..84: mol_type = other DNA
tttttttaagcagtggtatcaacgcagagtacnnttgttcggnngtaggttcnntttttttttttttttttttttttttttttt

SEQ ID NO: 2120 - DNA, 84 bp, synthetic construct
  source 1..84: mol_type = other DNA
tttttttaagcagtggtatcaacgcagagtacnnttgttcggnngtatggacnntttttttttttttttttttttttttttttt

SEQ ID NO: 2121 - DNA, 84 bp, synthetic construct
  source 1..84: mol_type = other DNA
tttttttaagcagtggtatcaacgcagagtacnnttgttcggnntcgcaacanntttttttttttttttttttttttttttttt

SEQ ID NO: 2122 - DNA, 84 bp, synthetic construct
  source 1..84: mol_type = other DNA
tttttttaagcagtggtatcaacgcagagtacnnttgttcggnnccgctaatnntttttttttttttttttttttttttttttt

SEQ ID NO: 2123 - DNA, 84 bp, synthetic construct
  source 1..84: mol_type = other DNA
tttttttaagcagtggtatcaacgcagagtacnnttgttcggnngattcgcanntttttttttttttttttttttttttttttt

SEQ ID NO: 2124 - DNA, 84 bp, synthetic construct
  source 1..84: mol_type = other DNA
tttttttaagcagtggtatcaacgcagagtacnnttgttcggnncgatggaanntttttttttttttttttttttttttttttt

SEQ ID NO: 2125 - DNA, 84 bp, synthetic construct
  source 1..84: mol_type = other DNA
tttttttaagcagtggtatcaacgcagagtacnnttgttcggnnagcaagganntttttttttttttttttttttttttttttt

SEQ ID NO: 2126 - DNA, 84 bp, synthetic construct
  source 1..84: mol_type = other DNA
tttttttaagcagtggtatcaacgcagagtacnnttgttcggnncgtagcaanntttttttttttttttttttttttttttttt

SEQ ID NO: 2127 - DNA, 84 bp, synthetic construct
  source 1..84: mol_type = other DNA
tttttttaagcagtggtatcaacgcagagtacnnttgttcggnntggcagtanntttttttttttttttttttttttttttttt

SEQ ID NO: 2128 - DNA, 84 bp, synthetic construct
  source 1..84: mol_type = other DNA
tttttttaagcagtggtatcaacgcagagtacnnttgttcggnncggtagttnntttttttttttttttttttttttttttttt

SEQ ID NO: 2129 - DNA, 84 bp, synthetic construct
  source 1..84: mol_type = other DNA
tttttttaagcagtggtatcaacgcagagtacnnttgttcggnntgacttcgnntttttttttttttttttttttttttttttt

SEQ ID NO: 2130 - DNA, 84 bp, synthetic construct
  source 1..84: mol_type = other DNA
tttttttaagcagtggtatcaacgcagagtacnnttgttcggnngagtgcaanntttttttttttttttttttttttttttttt

SEQ ID NO: 2131 - DNA, 84 bp, synthetic construct
  source 1..84: mol_type = other DNA
tttttttaagcagtggtatcaacgcagagtacnnttgttcggnnacggtaacnntttttttttttttttttttttttttttttt

SEQ ID NO: 2132 - DNA, 84 bp, synthetic construct
  source 1..84: mol_type = other DNA
tttttttaagcagtggtatcaacgcagagtacnnttgttcggnnaagtggtgnntttttttttttttttttttttttttttttt

SEQ ID NO: 2133 - DNA, 84 bp, synthetic construct
  source 1..84: mol_type = other DNA
tttttttaagcagtggtatcaacgcagagtacnnttgttcggnnggagacaanntttttttttttttttttttttttttttttt

SEQ ID NO: 2134 - DNA, 84 bp, synthetic construct
  source 1..84: mol_type = other DNA
tttttttaagcagtggtatcaacgcagagtacnnttgttcggnntcaaggacnntttttttttttttttttttttttttttttt

SEQ ID NO: 2135 - DNA, 84 bp, synthetic construct
  source 1..84: mol_type = other DNA
tttttttaagcagtggtatcaacgcagagtacnnttgttcggnnaagagagcnntttttttttttttttttttttttttttttt

SEQ ID NO: 2136 - DNA, 84 bp, synthetic construct
  source 1..84: mol_type = other DNA
tttttttaagcagtggtatcaacgcagagtacnnttgttcggnncgagagatnntttttttttttttttttttttttttttttt

SEQ ID NO: 2137 - DNA, 84 bp, synthetic construct
  source 1..84: mol_type = other DNA
tttttttaagcagtggtatcaacgcagagtacnnttgttcggnnacagatggnntttttttttttttttttttttttttttttt

SEQ ID NO: 2138 - DNA, 84 bp, synthetic construct
  source 1..84: mol_type = other DNA
tttttttaagcagtggtatcaacgcagagtacnnttgttcggnnaggagtcanntttttttttttttttttttttttttttttt

SEQ ID NO: 2139 - DNA, 84 bp, synthetic construct
  source 1..84: mol_type = other DNA
tttttttaagcagtggtatcaacgcagagtacnnttgttcggnncgtgttacnntttttttttttttttttttttttttttttt

SEQ ID NO: 2140 - DNA, 84 bp, synthetic construct
  source 1..84: mol_type = other DNA
tttttttaagcagtggtatcaacgcagagtacnnttgttcggnntagtgtgcnntttttttttttttttttttttttttttttt

SEQ ID NO: 2141 - DNA, 84 bp, synthetic construct
  source 1..84: mol_type = other DNA
tttttttaagcagtggtatcaacgcagagtacnnttgttcggnnctcatgacnntttttttttttttttttttttttttttttt

SEQ ID NO: 2142 - DNA, 84 bp, synthetic construct
  source 1..84: mol_type = other DNA
tttttttaagcagtggtatcaacgcagagtacnnttgttcggnngtatccagnntttttttttttttttttttttttttttttt

SEQ ID NO: 2143 - DNA, 84 bp, synthetic construct
  source 1..84: mol_type = other DNA
tttttttaagcagtggtatcaacgcagagtacnnttgttcggnnacgcctatnntttttttttttttttttttttttttttttt

SEQ ID NO: 2144 - DNA, 84 bp, synthetic construct
  source 1..84: mol_type = other DNA
tttttttaagcagtggtatcaacgcagagtacnnttgttcggnnaacgacctnntttttttttttttttttttttttttttttt

SEQ ID NO: 2145 - DNA, 84 bp, synthetic construct
  source 1..84: mol_type = other DNA
tttttttaagcagtggtatcaacgcagagtacnnttgttcggnnatcaggctnntttttttttttttttttttttttttttttt

SEQ ID NO: 2146 - DNA, 84 bp, synthetic construct
  source 1..84: mol_type = other DNA
tttttttaagcagtggtatcaacgcagagtacnnttgttcggnncaagttcgnntttttttttttttttttttttttttttttt

SEQ ID NO: 2147 - DNA, 84 bp, synthetic construct
  source 1..84: mol_type = other DNA
tttttttaagcagtggtatcaacgcagagtacnnttgttcggnntagccaganntttttttttttttttttttttttttttttt

SEQ ID NO: 2148 - DNA, 84 bp, synthetic construct
  source 1..84: mol_type = other DNA
tttttttaagcagtggtatcaacgcagagtacnnttgttcggnncaatcacgnntttttttttttttttttttttttttttttt

SEQ ID NO: 2149 - DNA, 84 bp, synthetic construct
  source 1..84: mol_type = other DNA
tttttttaagcagtggtatcaacgcagagtacnnttgttcggnngcaacaagnntttttttttttttttttttttttttttttt

SEQ ID NO: 2150 - DNA, 84 bp, synthetic construct
  source 1..84: mol_type = other DNA
tttttttaagcagtggtatcaacgcagagtacnnttgttcggnncacgacaanntttttttttttttttttttttttttttttt

SEQ ID NO: 2151 - DNA, 84 bp, synthetic construct
  source 1..84: mol_type = other DNA
tttttttaagcagtggtatcaacgcagagtacnnttgttcggnntacggaganntttttttttttttttttttttttttttttt

SEQ ID NO: 2152 - DNA, 84 bp, synthetic construct
  source 1..84: mol_type = other DNA
tttttttaagcagtggtatcaacgcagagtacnnttgttcggnncgacaaganntttttttttttttttttttttttttttttt

SEQ ID NO: 2153 - DNA, 84 bp, synthetic construct
  source 1..84: mol_type = other DNA
tttttttaagcagtggtatcaacgcagagtacnnttgttcggnncgaagtganntttttttttttttttttttttttttttttt

SEQ ID NO: 2154 - DNA, 84 bp, synthetic construct
  source 1..84: mol_type = other DNA
tttttttaagcagtggtatcaacgcagagtacnnttgttcggnnagctggtanntttttttttttttttttttttttttttttt

SEQ ID NO: 2155 - DNA, 84 bp, synthetic construct
  source 1..84: mol_type = other DNA
tttttttaagcagtggtatcaacgcagagtacnnttgttcggnnaactaggcnntttttttttttttttttttttttttttttt

SEQ ID NO: 2156 - DNA, 84 bp, synthetic construct
  source 1..84: mol_type = other DNA
tttttttaagcagtggtatcaacgcagagtacnnttgttcggnncagcaagtnntttttttttttttttttttttttttttttt

SEQ ID NO: 2157 - DNA, 84 bp, synthetic construct
  source 1..84: mol_type = other DNA
tttttttaagcagtggtatcaacgcagagtacnnttgttcggnnacgaggtanntttttttttttttttttttttttttttttt

SEQ ID NO: 2158 - DNA, 84 bp, synthetic construct
  source 1..84: mol_type = other DNA
tttttttaagcagtggtatcaacgcagagtacnnttgttcggnncatcttccnntttttttttttttttttttttttttttttt

SEQ ID NO: 2159 - DNA, 84 bp, synthetic construct
  source 1..84: mol_type = other DNA
tttttttaagcagtggtatcaacgcagagtacnnttgttcggnncctgaatcnntttttttttttttttttttttttttttttt

SEQ ID NO: 2160 - DNA, 84 bp, synthetic construct
  source 1..84: mol_type = other DNA
tttttttaagcagtggtatcaacgcagagtacnnttgttcggnntgcagactnntttttttttttttttttttttttttttttt

SEQ ID NO: 2161 - DNA, 84 bp, synthetic construct
  source 1..84: mol_type = other DNA
tttttttaagcagtggtatcaacgcagagtacnnttgttcggnnagatgtggnntttttttttttttttttttttttttttttt

SEQ ID NO: 2162 - DNA, 84 bp, synthetic construct
  source 1..84: mol_type = other DNA
tttttttaagcagtggtatcaacgcagagtacnnttgttcggnnagttcgacnntttttttttttttttttttttttttttttt

SEQ ID NO: 2163 - DNA, 84 bp, synthetic construct
  source 1..84: mol_type = other DNA
tttttttaagcagtggtatcaacgcagagtacnnttgttcggnnacaacctcnntttttttttttttttttttttttttttttt

SEQ ID NO: 2164 - DNA, 84 bp, synthetic construct
  source 1..84: mol_type = other DNA
tttttttaagcagtggtatcaacgcagagtacnnttgttcggnncatggtagnntttttttttttttttttttttttttttttt

SEQ ID NO: 2165 - DNA, 84 bp, synthetic construct
  source 1..84: mol_type = other DNA
tttttttaagcagtggtatcaacgcagagtacnnttgttcggnncgtatctcnntttttttttttttttttttttttttttttt

SEQ ID NO: 2166 - DNA, 84 bp, synthetic construct
  source 1..84: mol_type = other DNA
tttttttaagcagtggtatcaacgcagagtacnnttgttcggnncctagttcnntttttttttttttttttttttttttttttt

SEQ ID NO: 2167 - DNA, 84 bp, synthetic construct
  source 1..84: mol_type = other DNA
tttttttaagcagtggtatcaacgcagagtacnnttgttcggnncaagagtcnntttttttttttttttttttttttttttttt

SEQ ID NO: 2168 - DNA, 84 bp, synthetic construct
  source 1..84: mol_type = other DNA
tttttttaagcagtggtatcaacgcagagtacnngatcttggnnaatcggcanntttttttttttttttttttttttttttttt

SEQ ID NO: 2169 - DNA, 84 bp, synthetic construct
  source 1..84: mol_type = other DNA
tttttttaagcagtggtatcaacgcagagtacnngatcttggnntacggcatnntttttttttttttttttttttttttttttt

SEQ ID NO: 2170 - DNA, 84 bp, synthetic construct
  source 1..84: mol_type = other DNA
tttttttaagcagtggtatcaacgcagagtacnngatcttggnnttggatcgnntttttttttttttttttttttttttttttt

SEQ ID NO: 2171 - DNA, 84 bp, synthetic construct
  source 1..84: mol_type = other DNA
tttttttaagcagtggtatcaacgcagagtacnngatcttggnntggaacganntttttttttttttttttttttttttttttt

SEQ ID NO: 2172 - DNA, 84 bp, synthetic construct
  source 1..84: mol_type = other DNA
tttttttaagcagtggtatcaacgcagagtacnngatcttggnnggcaatcanntttttttttttttttttttttttttttttt

SEQ ID NO: 2173 - DNA, 84 bp, synthetic construct
  source 1..84: mol_type = other DNA
tttttttaagcagtggtatcaacgcagagtacnngatcttggnngaatccganntttttttttttttttttttttttttttttt

SEQ ID NO: 2174 - DNA, 84 bp, synthetic construct
  source 1..84: mol_type = other DNA
tttttttaagcagtggtatcaacgcagagtacnngatcttggnnttacggtgnntttttttttttttttttttttttttttttt

SEQ ID NO: 2175 - DNA, 84 bp, synthetic construct
  source 1..84: mol_type = other DNA
tttttttaagcagtggtatcaacgcagagtacnngatcttggnncatatcggnntttttttttttttttttttttttttttttt

SEQ ID NO: 2176 - DNA, 84 bp, synthetic construct
  source 1..84: mol_type = other DNA
tttttttaagcagtggtatcaacgcagagtacnngatcttggnncttcggtanntttttttttttttttttttttttttttttt

SEQ ID NO: 2177 - DNA, 84 bp, synthetic construct
  source 1..84: mol_type = other DNA
tttttttaagcagtggtatcaacgcagagtacnngatcttggnntcctaacgnntttttttttttttttttttttttttttttt

SEQ ID NO: 2178 - DNA, 84 bp, synthetic construct
  source 1..84: mol_type = other DNA
tttttttaagcagtggtatcaacgcagagtacnngatcttggnngtaagccanntttttttttttttttttttttttttttttt

SEQ ID NO: 2179 - DNA, 84 bp, synthetic construct
  source 1..84: mol_type = other DNA
tttttttaagcagtggtatcaacgcagagtacnngatcttggnntaaggtggnntttttttttttttttttttttttttttttt

SEQ ID NO: 2180 - DNA, 84 bp, synthetic construct
  source 1..84: mol_type = other DNA
tttttttaagcagtggtatcaacgcagagtacnngatcttggnnggtaagctnntttttttttttttttttttttttttttttt

SEQ ID NO: 2181 - DNA, 84 bp, synthetic construct
  source 1..84: mol_type = other DNA
tttttttaagcagtggtatcaacgcagagtacnngatcttggnntgtgtcganntttttttttttttttttttttttttttttt

SEQ ID NO: 2182 - DNA, 84 bp, synthetic construct
  source 1..84: mol_type = other DNA
tttttttaagcagtggtatcaacgcagagtacnngatcttggnngagcatganntttttttttttttttttttttttttttttt

SEQ ID NO: 2183 - DNA, 84 bp, synthetic construct
  source 1..84: mol_type = other DNA
tttttttaagcagtggtatcaacgcagagtacnngatcttggnntcgaagtcnntttttttttttttttttttttttttttttt

SEQ ID NO: 2184 - DNA, 84 bp, synthetic construct
  source 1..84: mol_type = other DNA
tttttttaagcagtggtatcaacgcagagtacnngatcttggnnggtgaacanntttttttttttttttttttttttttttttt

SEQ ID NO: 2185 - DNA, 84 bp, synthetic construct
  source 1..84: mol_type = other DNA
tttttttaagcagtggtatcaacgcagagtacnngatcttggnnacatgcacnntttttttttttttttttttttttttttttt

SEQ ID NO: 2186 - DNA, 84 bp, synthetic construct
  source 1..84: mol_type = other DNA
tttttttaagcagtggtatcaacgcagagtacnngatcttggnnccaacagtnntttttttttttttttttttttttttttttt

SEQ ID NO: 2187 - DNA, 84 bp, synthetic construct
  source 1..84: mol_type = other DNA
tttttttaagcagtggtatcaacgcagagtacnngatcttggnnagaacagcnntttttttttttttttttttttttttttttt

SEQ ID NO: 2188 - DNA, 84 bp, synthetic construct
  source 1..84: mol_type = other DNA
tttttttaagcagtggtatcaacgcagagtacnngatcttggnngaacacgtnntttttttttttttttttttttttttttttt

SEQ ID NO: 2189 - DNA, 84 bp, synthetic construct
  source 1..84: mol_type = other DNA
tttttttaagcagtggtatcaacgcagagtacnngatcttggnnggtcttcanntttttttttttttttttttttttttttttt

SEQ ID NO: 2190 - DNA, 84 bp, synthetic construct
  source 1..84: mol_type = other DNA
tttttttaagcagtggtatcaacgcagagtacnngatcttggnnaggttcagnntttttttttttttttttttttttttttttt

SEQ ID NO: 2191 - DNA, 84 bp, synthetic construct
  source 1..84: mol_type = other DNA
tttttttaagcagtggtatcaacgcagagtacnngatcttggnnctagagcanntttttttttttttttttttttttttttttt

SEQ ID NO: 2192 - DNA, 84 bp, synthetic construct
  source 1..84: mol_type = other DNA
tttttttaagcagtggtatcaacgcagagtacnngatcttggnncttctagcnntttttttttttttttttttttttttttttt

SEQ ID NO: 2193 - DNA, 84 bp, synthetic construct
  source 1..84: mol_type = other DNA
tttttttaagcagtggtatcaacgcagagtacnngatcttggnngagtaacgnntttttttttttttttttttttttttttttt

SEQ ID NO: 2194 - DNA, 84 bp, synthetic construct
  source 1..84: mol_type = other DNA
tttttttaagcagtggtatcaacgcagagtacnngatcttggnnctaagaggnntttttttttttttttttttttttttttttt

SEQ ID NO: 2195 - DNA, 84 bp, synthetic construct
  source 1..84: mol_type = other DNA
tttttttaagcagtggtatcaacgcagagtacnngatcttggnnacgtgtagnntttttttttttttttttttttttttttttt

SEQ ID NO: 2196 - DNA, 84 bp, synthetic construct
  source 1..84: mol_type = other DNA
tttttttaagcagtggtatcaacgcagagtacnngatcttggnnactacaggnntttttttttttttttttttttttttttttt

SEQ ID NO: 2197 - DNA, 84 bp, synthetic construct
  source 1..84: mol_type = other DNA
tttttttaagcagtggtatcaacgcagagtacnngatcttggnntacaggtcnntttttttttttttttttttttttttttttt

SEQ ID NO: 2198 - DNA, 84 bp, synthetic construct
  source 1..84: mol_type = other DNA
tttttttaagcagtggtatcaacgcagagtacnngatcttggnnctcacatgnntttttttttttttttttttttttttttttt

SEQ ID NO: 2199 - DNA, 84 bp, synthetic construct
  source 1..84: mol_type = other DNA
tttttttaagcagtggtatcaacgcagagtacnngatcttggnnactaggagnntttttttttttttttttttttttttttttt

SEQ ID NO: 2200 - DNA, 84 bp, synthetic construct
  source 1..84: mol_type = other DNA
tttttttaagcagtggtatcaacgcagagtacnngatcttggnnccatagganntttttttttttttttttttttttttttttt

SEQ ID NO: 2201 - DNA, 84 bp, synthetic construct
  source 1..84: mol_type = other DNA
tttttttaagcagtggtatcaacgcagagtacnngatcttggnnggagaatcnntttttttttttttttttttttttttttttt

SEQ ID NO: 2202 - DNA, 84 bp, synthetic construct
  source 1..84: mol_type = other DNA
tttttttaagcagtggtatcaacgcagagtacnngatcttggnngccaagaanntttttttttttttttttttttttttttttt

SEQ ID NO: 2203 - DNA, 84 bp, synthetic construct
  source 1..84: mol_type = other DNA
tttttttaagcagtggtatcaacgcagagtacnngatcttggnnaaggcaagnntttttttttttttttttttttttttttttt

SEQ ID NO: 2204 - DNA, 84 bp, synthetic construct
  source 1..84: mol_type = other DNA
tttttttaagcagtggtatcaacgcagagtacnngatcttggnnaatgtcgcnntttttttttttttttttttttttttttttt

SEQ ID NO: 2205 - DNA, 84 bp, synthetic construct
  source 1..84: mol_type = other DNA
tttttttaagcagtggtatcaacgcagagtacnngatcttggnnatggaaccnntttttttttttttttttttttttttttttt

SEQ ID NO: 2206 - DNA, 84 bp, synthetic construct
  source 1..84: mol_type = other DNA
tttttttaagcagtggtatcaacgcagagtacnngatcttggnnagaggcatnntttttttttttttttttttttttttttttt

SEQ ID NO: 2207 - DNA, 84 bp, synthetic construct
  source 1..84: mol_type = other DNA
tttttttaagcagtggtatcaacgcagagtacnngatcttggnntgcatagcnntttttttttttttttttttttttttttttt

SEQ ID NO: 2208 - DNA, 84 bp, synthetic construct
  source 1..84: mol_type = other DNA
tttttttaagcagtggtatcaacgcagagtacnngatcttggnnctaacgganntttttttttttttttttttttttttttttt

SEQ ID NO: 2209 - DNA, 84 bp, synthetic construct
  source 1..84: mol_type = other DNA
tttttttaagcagtggtatcaacgcagagtacnngatcttggnntatcgaggnntttttttttttttttttttttttttttttt

SEQ ID NO: 2210 - DNA, 84 bp, synthetic construct
  source 1..84: mol_type = other DNA
tttttttaagcagtggtatcaacgcagagtacnngatcttggnncatagcctnntttttttttttttttttttttttttttttt

SEQ ID NO: 2211 - DNA, 84 bp, synthetic construct
  source 1..84: mol_type = other DNA
tttttttaagcagtggtatcaacgcagagtacnngatcttggnnatcgagacnntttttttttttttttttttttttttttttt

SEQ ID NO: 2212 - DNA, 84 bp, synthetic construct
  source 1..84: mol_type = other DNA
tttttttaagcagtggtatcaacgcagagtacnngatcttggnnggaagagtnntttttttttttttttttttttttttttttt

SEQ ID NO: 2213 - DNA, 84 bp, synthetic construct
  source 1..84: mol_type = other DNA
tttttttaagcagtggtatcaacgcagagtacnngatcttggnnccaagtagnntttttttttttttttttttttttttttttt

SEQ ID NO: 2214 - DNA, 84 bp, synthetic construct
  source 1..84: mol_type = other DNA
tttttttaagcagtggtatcaacgcagagtacnngatcttggnnctgaacagnntttttttttttttttttttttttttttttt

SEQ ID NO: 2215 - DNA, 84 bp, synthetic construct
  source 1..84: mol_type = other DNA
tttttttaagcagtggtatcaacgcagagtacnngatcttggnngtaggttcnntttttttttttttttttttttttttttttt

SEQ ID NO: 2216 - DNA, 84 bp, synthetic construct
  source 1..84: mol_type = other DNA
tttttttaagcagtggtatcaacgcagagtacnngatcttggnngtatggacnntttttttttttttttttttttttttttttt

SEQ ID NO: 2217 - DNA, 84 bp, synthetic construct
  source 1..84: mol_type = other DNA
tttttttaagcagtggtatcaacgcagagtacnngatcttggnntcgcaacanntttttttttttttttttttttttttttttt

SEQ ID NO: 2218 - DNA, 84 bp, synthetic construct
  source 1..84: mol_type = other DNA
tttttttaagcagtggtatcaacgcagagtacnngatcttggnnccgctaatnntttttttttttttttttttttttttttttt

SEQ ID NO: 2219 - DNA, 84 bp, synthetic construct
  source 1..84: mol_type = other DNA
tttttttaagcagtggtatcaacgcagagtacnngatcttggnngattcgcanntttttttttttttttttttttttttttttt

SEQ ID NO: 2220 - DNA, 84 bp, synthetic construct
  source 1..84: mol_type = other DNA
tttttttaagcagtggtatcaacgcagagtacnngatcttggnncgatggaanntttttttttttttttttttttttttttttt

SEQ ID NO: 2221 - DNA, 84 bp, synthetic construct
  source 1..84: mol_type = other DNA
tttttttaagcagtggtatcaacgcagagtacnngatcttggnnagcaagganntttttttttttttttttttttttttttttt

SEQ ID NO: 2222 - DNA, 84 bp, synthetic construct
  source 1..84: mol_type = other DNA
tttttttaagcagtggtatcaacgcagagtacnngatcttggnncgtagcaanntttttttttttttttttttttttttttttt

SEQ ID NO: 2223 - DNA, 84 bp, synthetic construct
  source 1..84: mol_type = other DNA
tttttttaagcagtggtatcaacgcagagtacnngatcttggnntggcagtanntttttttttttttttttttttttttttttt

SEQ ID NO: 2224 - DNA, 84 bp, synthetic construct
  source 1..84: mol_type = other DNA
tttttttaagcagtggtatcaacgcagagtacnngatcttggnncggtagttnntttttttttttttttttttttttttttttt

SEQ ID NO: 2225 - DNA, 84 bp, synthetic construct
  source 1..84: mol_type = other DNA
tttttttaagcagtggtatcaacgcagagtacnngatcttggnntgacttcgnntttttttttttttttttttttttttttttt

SEQ ID NO: 2226 - DNA, 84 bp, synthetic construct
  source 1..84: mol_type = other DNA
tttttttaagcagtggtatcaacgcagagtacnngatcttggnngagtgcaanntttttttttttttttttttttttttttttt

SEQ ID NO: 2227 - DNA, 84 bp, synthetic construct
  source 1..84: mol_type = other DNA
tttttttaagcagtggtatcaacgcagagtacnngatcttggnnacggtaacnntttttttttttttttttttttttttttttt

SEQ ID NO: 2228 - DNA, 84 bp, synthetic construct
  source 1..84: mol_type = other DNA
tttttttaagcagtggtatcaacgcagagtacnngatcttggnnaagtggtgnntttttttttttttttttttttttttttttt

SEQ ID NO: 2229 - DNA, 84 bp, synthetic construct
  source 1..84: mol_type = other DNA
tttttttaagcagtggtatcaacgcagagtacnngatcttggnnggagacaanntttttttttttttttttttttttttttttt

SEQ ID NO: 2230 - DNA, 84 bp, synthetic construct
  source 1..84: mol_type = other DNA
tttttttaagcagtggtatcaacgcagagtacnngatcttggnntcaaggacnntttttttttttttttttttttttttttttt

SEQ ID NO: 2231 - DNA, 84 bp, synthetic construct
  source 1..84: mol_type = other DNA
tttttttaagcagtggtatcaacgcagagtacnngatcttggnnaagagagcnntttttttttttttttttttttttttttttt

SEQ ID NO: 2232 - DNA, 84 bp, synthetic construct
  source 1..84: mol_type = other DNA
tttttttaagcagtggtatcaacgcagagtacnngatcttggnncgagagatnntttttttttttttttttttttttttttttt

SEQ ID NO: 2233 - DNA, 84 bp, synthetic construct
  source 1..84: mol_type = other DNA
tttttttaagcagtggtatcaacgcagagtacnngatcttggnnacagatggnntttttttttttttttttttttttttttttt

SEQ ID NO: 2234 - DNA, 84 bp, synthetic construct
  source 1..84: mol_type = other DNA
tttttttaagcagtggtatcaacgcagagtacnngatcttggnnaggagtcanntttttttttttttttttttttttttttttt

SEQ ID NO: 2235 - DNA, 84 bp, synthetic construct
  source 1..84: mol_type = other DNA
tttttttaagcagtggtatcaacgcagagtacnngatcttggnncgtgttacnntttttttttttttttttttttttttttttt

SEQ ID NO: 2236 - DNA, 84 bp, synthetic construct
  source 1..84: mol_type = other DNA
tttttttaagcagtggtatcaacgcagagtacnngatcttggnntagtgtgcnntttttttttttttttttttttttttttttt

SEQ ID NO: 2237 - DNA, 84 bp, synthetic construct
  source 1..84: mol_type = other DNA
tttttttaagcagtggtatcaacgcagagtacnngatcttggnnctcatgacnntttttttttttttttttttttttttttttt

SEQ ID NO: 2238 - DNA, 84 bp, synthetic construct
  source 1..84: mol_type = other DNA
tttttttaagcagtggtatcaacgcagagtacnngatcttggnngtatccagnntttttttttttttttttttttttttttttt

SEQ ID NO: 2239 - DNA, 84 bp, synthetic construct
  source 1..84: mol_type = other DNA
tttttttaagcagtggtatcaacgcagagtacnngatcttggnnacgcctatnntttttttttttttttttttttttttttttt

SEQ ID NO: 2240 - DNA, 84 bp, synthetic construct
  source 1..84: mol_type = other DNA
tttttttaagcagtggtatcaacgcagagtacnngatcttggnnaacgacctnntttttttttttttttttttttttttttttt

SEQ ID NO: 2241 - DNA, 84 bp, synthetic construct
  source 1..84: mol_type = other DNA
tttttttaagcagtggtatcaacgcagagtacnngatcttggnnatcaggctnntttttttttttttttttttttttttttttt

SEQ ID NO: 2242 - DNA, 84 bp, synthetic construct
  source 1..84: mol_type = other DNA
tttttttaagcagtggtatcaacgcagagtacnngatcttggnncaagttcgnntttttttttttttttttttttttttttttt

SEQ ID NO: 2243 - DNA, 84 bp, synthetic construct
  source 1..84: mol_type = other DNA
tttttttaagcagtggtatcaacgcagagtacnngatcttggnntagccaganntttttttttttttttttttttttttttttt

SEQ ID NO: 2244 - DNA, 84 bp, synthetic construct
  source 1..84: mol_type = other DNA
tttttttaagcagtggtatcaacgcagagtacnngatcttggnncaatcacgnntttttttttttttttttttttttttttttt

SEQ ID NO: 2245 - DNA, 84 bp, synthetic construct
  source 1..84: mol_type = other DNA
tttttttaagcagtggtatcaacgcagagtacnngatcttggnngcaacaagnntttttttttttttttttttttttttttttt

SEQ ID NO: 2246 - DNA, 84 bp, synthetic construct
  source 1..84: mol_type = other DNA
tttttttaagcagtggtatcaacgcagagtacnngatcttggnncacgacaanntttttttttttttttttttttttttttttt

SEQ ID NO: 2247 - DNA, 84 bp, synthetic construct
  source 1..84: mol_type = other DNA
tttttttaagcagtggtatcaacgcagagtacnngatcttggnntacggaganntttttttttttttttttttttttttttttt

SEQ ID NO: 2248 - DNA, 84 bp, synthetic construct
  source 1..84: mol_type = other DNA
tttttttaagcagtggtatcaacgcagagtacnngatcttggnncgacaaganntttttttttttttttttttttttttttttt

SEQ ID NO: 2249 - DNA, 84 bp, synthetic construct
  source 1..84: mol_type = other DNA
tttttttaagcagtggtatcaacgcagagtacnngatcttggnncgaagtganntttttttttttttttttttttttttttttt

SEQ ID NO: 2250 - DNA, 84 bp, synthetic construct
  source 1..84: mol_type = other DNA
tttttttaagcagtggtatcaacgcagagtacnngatcttggnnagctggtanntttttttttttttttttttttttttttttt

SEQ ID NO: 2251 - DNA, 84 bp, synthetic construct
  source 1..84: mol_type = other DNA
tttttttaagcagtggtatcaacgcagagtacnngatcttggnnaactaggcnntttttttttttttttttttttttttttttt

SEQ ID NO: 2252 - DNA, 84 bp, synthetic construct
  source 1..84: mol_type = other DNA
tttttttaagcagtggtatcaacgcagagtacnngatcttggnncagcaagtnntttttttttttttttttttttttttttttt

SEQ ID NO: 2253 - DNA, 84 bp, synthetic construct
  source 1..84: mol_type = other DNA
tttttttaagcagtggtatcaacgcagagtacnngatcttggnnacgaggtanntttttttttttttttttttttttttttttt

SEQ ID NO: 2254 - DNA, 84 bp, synthetic construct
  source 1..84: mol_type = other DNA
tttttttaagcagtggtatcaacgcagagtacnngatcttggnncatcttccnntttttttttttttttttttttttttttttt

SEQ ID NO: 2255 - DNA, 84 bp, synthetic construct
  source 1..84: mol_type = other DNA
tttttttaagcagtggtatcaacgcagagtacnngatcttggnncctgaatcnntttttttttttttttttttttttttttttt

SEQ ID NO: 2256 - DNA, 84 bp, synthetic construct
  source 1..84: mol_type = other DNA
tttttttaagcagtggtatcaacgcagagtacnngatcttggnntgcagactnntttttttttttttttttttttttttttttt

SEQ ID NO: 2257 - DNA, 84 bp, synthetic construct
  source 1..84: mol_type = other DNA
tttttttaagcagtggtatcaacgcagagtacnngatcttggnnagatgtggnntttttttttttttttttttttttttttttt

SEQ ID NO: 2258 - DNA, 84 bp, synthetic construct
  source 1..84: mol_type = other DNA
tttttttaagcagtggtatcaacgcagagtacnngatcttggnnagttcgacnntttttttttttttttttttttttttttttt

SEQ ID NO: 2259 - DNA, 84 bp, synthetic construct
  source 1..84: mol_type = other DNA
tttttttaagcagtggtatcaacgcagagtacnngatcttggnnacaacctcnntttttttttttttttttttttttttttttt

SEQ ID NO: 2260 - DNA, 84 bp, synthetic construct
  source 1..84: mol_type = other DNA
tttttttaagcagtggtatcaacgcagagtacnngatcttggnncatggtagnntttttttttttttttttttttttttttttt

SEQ ID NO: 2261 - DNA, 84 bp, synthetic construct
  source 1..84: mol_type = other DNA
tttttttaagcagtggtatcaacgcagagtacnngatcttggnncgtatctcnntttttttttttttttttttttttttttttt

SEQ ID NO: 2262 - DNA, 84 bp, synthetic construct
  source 1..84: mol_type = other DNA
tttttttaagcagtggtatcaacgcagagtacnngatcttggnncctagttcnntttttttttttttttttttttttttttttt

SEQ ID NO: 2263 - DNA, 84 bp, synthetic construct
  source 1..84: mol_type = other DNA
tttttttaagcagtggtatcaacgcagagtacnngatcttggnncaagagtcnntttttttttttttttttttttttttttttt

SEQ ID NO: 2264 - DNA, 84 bp, synthetic construct
  source 1..84: mol_type = other DNA
tttttttaagcagtggtatcaacgcagagtacnngtgaggaannaatcggcanntttttttttttttttttttttttttttttt

SEQ ID NO: 2265 - DNA, 84 bp, synthetic construct
  source 1..84: mol_type = other DNA
tttttttaagcagtggtatcaacgcagagtacnngtgaggaanntacggcatnntttttttttttttttttttttttttttttt

SEQ ID NO: 2266 - DNA, 84 bp, synthetic construct
  source 1..84: mol_type = other DNA
tttttttaagcagtggtatcaacgcagagtacnngtgaggaannttggatcgnntttttttttttttttttttttttttttttt

SEQ ID NO: 2267 - DNA, 84 bp, synthetic construct
  source 1..84: mol_type = other DNA
tttttttaagcagtggtatcaacgcagagtacnngtgaggaanntggaacganntttttttttttttttttttttttttttttt

SEQ ID NO: 2268 - DNA, 84 bp, synthetic construct
  source 1..84: mol_type = other DNA
tttttttaagcagtggtatcaacgcagagtacnngtgaggaannggcaatcanntttttttttttttttttttttttttttttt

SEQ ID NO: 2269 - DNA, 84 bp, synthetic construct
  source 1..84: mol_type = other DNA
tttttttaagcagtggtatcaacgcagagtacnngtgaggaanngaatccganntttttttttttttttttttttttttttttt

SEQ ID NO: 2270 - DNA, 84 bp, synthetic construct
  source 1..84: mol_type = other DNA
tttttttaagcagtggtatcaacgcagagtacnngtgaggaannttacggtgnntttttttttttttttttttttttttttttt

SEQ ID NO: 2271 - DNA, 84 bp, synthetic construct
  source 1..84: mol_type = other DNA
tttttttaagcagtggtatcaacgcagagtacnngtgaggaanncatatcggnntttttttttttttttttttttttttttttt

SEQ ID NO: 2272 - DNA, 84 bp, synthetic construct
  source 1..84: mol_type = other DNA
tttttttaagcagtggtatcaacgcagagtacnngtgaggaanncttcggtanntttttttttttttttttttttttttttttt

SEQ ID NO: 2273 - DNA, 84 bp, synthetic construct
  source 1..84: mol_type = other DNA
tttttttaagcagtggtatcaacgcagagtacnngtgaggaanntcctaacgnntttttttttttttttttttttttttttttt

SEQ ID NO: 2274 - DNA, 84 bp, synthetic construct
  source 1..84: mol_type = other DNA
tttttttaagcagtggtatcaacgcagagtacnngtgaggaanngtaagccanntttttttttttttttttttttttttttttt

SEQ ID NO: 2275 - DNA, 84 bp, synthetic construct
  source 1..84: mol_type = other DNA
tttttttaagcagtggtatcaacgcagagtacnngtgaggaanntaaggtggnntttttttttttttttttttttttttttttt

SEQ ID NO: 2276 - DNA, 84 bp, synthetic construct
  source 1..84: mol_type = other DNA
tttttttaagcagtggtatcaacgcagagtacnngtgaggaannggtaagctnntttttttttttttttttttttttttttttt

SEQ ID NO: 2277 - DNA, 84 bp, synthetic construct
  source 1..84: mol_type = other DNA
tttttttaagcagtggtatcaacgcagagtacnngtgaggaanntgtgtcganntttttttttttttttttttttttttttttt

SEQ ID NO: 2278 - DNA, 84 bp, synthetic construct
  source 1..84: mol_type = other DNA
tttttttaagcagtggtatcaacgcagagtacnngtgaggaanngagcatganntttttttttttttttttttttttttttttt

SEQ ID NO: 2279 - DNA, 84 bp, synthetic construct
  source 1..84: mol_type = other DNA
tttttttaagcagtggtatcaacgcagagtacnngtgaggaanntcgaagtcnntttttttttttttttttttttttttttttt

SEQ ID NO: 2280 - DNA, 84 bp, synthetic construct
  source 1..84: mol_type = other DNA
tttttttaagcagtggtatcaacgcagagtacnngtgaggaannggtgaacanntttttttttttttttttttttttttttttt

SEQ ID NO: 2281 - DNA, 84 bp, synthetic construct
  source 1..84: mol_type = other DNA
tttttttaagcagtggtatcaacgcagagtacnngtgaggaannacatgcacnntttttttttttttttttttttttttttttt

SEQ ID NO: 2282 - DNA, 84 bp, synthetic construct
  source 1..84: mol_type = other DNA
tttttttaagcagtggtatcaacgcagagtacnngtgaggaannccaacagtnntttttttttttttttttttttttttttttt

SEQ ID NO: 2283 - DNA, 84 bp, synthetic construct
  source 1..84: mol_type = other DNA
tttttttaagcagtggtatcaacgcagagtacnngtgaggaannagaacagcnntttttttttttttttttttttttttttttt

SEQ ID NO: 2284 - DNA, 84 bp, synthetic construct
  source 1..84: mol_type = other DNA
tttttttaagcagtggtatcaacgcagagtacnngtgaggaanngaacacgtnntttttttttttttttttttttttttttttt

SEQ ID NO: 2285 - DNA, 84 bp, synthetic construct
  source 1..84: mol_type = other DNA
tttttttaagcagtggtatcaacgcagagtacnngtgaggaannggtcttcanntttttttttttttttttttttttttttttt

SEQ ID NO: 2286 - DNA, 84 bp, synthetic construct
  source 1..84: mol_type = other DNA
tttttttaagcagtggtatcaacgcagagtacnngtgaggaannaggttcagnntttttttttttttttttttttttttttttt

SEQ ID NO: 2287 - DNA, 84 bp, synthetic construct
  source 1..84: mol_type = other DNA
tttttttaagcagtggtatcaacgcagagtacnngtgaggaannctagagcanntttttttttttttttttttttttttttttt

SEQ ID NO: 2288 - DNA, 84 bp, synthetic construct
  source 1..84: mol_type = other DNA
tttttttaagcagtggtatcaacgcagagtacnngtgaggaanncttctagcnntttttttttttttttttttttttttttttt

SEQ ID NO: 2289 - DNA, 84 bp, synthetic construct
  source 1..84: mol_type = other DNA
tttttttaagcagtggtatcaacgcagagtacnngtgaggaanngagtaacgnntttttttttttttttttttttttttttttt

SEQ ID NO: 2290 - DNA, 84 bp, synthetic construct
  source 1..84: mol_type = other DNA
tttttttaagcagtggtatcaacgcagagtacnngtgaggaannctaagaggnntttttttttttttttttttttttttttttt

SEQ ID NO: 2291 - DNA, 84 bp, synthetic construct
  source 1..84: mol_type = other DNA
tttttttaagcagtggtatcaacgcagagtacnngtgaggaannacgtgtagnntttttttttttttttttttttttttttttt

SEQ ID NO: 2292 - DNA, 84 bp, synthetic construct
  source 1..84: mol_type = other DNA
tttttttaagcagtggtatcaacgcagagtacnngtgaggaannactacaggnntttttttttttttttttttttttttttttt

SEQ ID NO: 2293 - DNA, 84 bp, synthetic construct
  source 1..84: mol_type = other DNA
tttttttaagcagtggtatcaacgcagagtacnngtgaggaanntacaggtcnntttttttttttttttttttttttttttttt

SEQ ID NO: 2294 - DNA, 84 bp, synthetic construct
  source 1..84: mol_type = other DNA
tttttttaagcagtggtatcaacgcagagtacnngtgaggaannctcacatgnntttttttttttttttttttttttttttttt

SEQ ID NO: 2295 - DNA, 84 bp, synthetic construct
  source 1..84: mol_type = other DNA
tttttttaagcagtggtatcaacgcagagtacnngtgaggaannactaggagnntttttttttttttttttttttttttttttt

SEQ ID NO: 2296 - DNA, 84 bp, synthetic construct
  source 1..84: mol_type = other DNA
tttttttaagcagtggtatcaacgcagagtacnngtgaggaannccatagganntttttttttttttttttttttttttttttt

SEQ ID NO: 2297 - DNA, 84 bp, synthetic construct
  source 1..84: mol_type = other DNA
tttttttaagcagtggtatcaacgcagagtacnngtgaggaannggagaatcnntttttttttttttttttttttttttttttt

SEQ ID NO: 2298 - DNA, 84 bp, synthetic construct
  source 1..84: mol_type = other DNA
tttttttaagcagtggtatcaacgcagagtacnngtgaggaanngccaagaanntttttttttttttttttttttttttttttt

SEQ ID NO: 2299 - DNA, 84 bp, synthetic construct
  source 1..84: mol_type = other DNA
tttttttaagcagtggtatcaacgcagagtacnngtgaggaannaaggcaagnntttttttttttttttttttttttttttttt

SEQ ID NO: 2300 - DNA, 84 bp, synthetic construct
  source 1..84: mol_type = other DNA
tttttttaagcagtggtatcaacgcagagtacnngtgaggaannaatgtcgcnntttttttttttttttttttttttttttttt

SEQ ID NO: 2301 - DNA, 84 bp, synthetic construct
  source 1..84: mol_type = other DNA
tttttttaagcagtggtatcaacgcagagtacnngtgaggaannatggaaccnntttttttttttttttttttttttttttttt

SEQ ID NO: 2302 - DNA, 84 bp, synthetic construct
  source 1..84: mol_type = other DNA
tttttttaagcagtggtatcaacgcagagtacnngtgaggaannagaggcatnntttttttttttttttttttttttttttttt

SEQ ID NO: 2303 - DNA, 84 bp, synthetic construct
  source 1..84: mol_type = other DNA
tttttttaagcagtggtatcaacgcagagtacnngtgaggaanntgcatagcnntttttttttttttttttttttttttttttt

SEQ ID NO: 2304 - DNA, 84 bp, synthetic construct
  source 1..84: mol_type = other DNA
tttttttaagcagtggtatcaacgcagagtacnngtgaggaannctaacgganntttttttttttttttttttttttttttttt

SEQ ID NO: 2305 - DNA, 84 bp, synthetic construct
  source 1..84: mol_type = other DNA
tttttttaagcagtggtatcaacgcagagtacnngtgaggaanntatcgaggnntttttttttttttttttttttttttttttt

SEQ ID NO: 2306 - DNA, 84 bp, synthetic construct
  source 1..84: mol_type = other DNA
tttttttaagcagtggtatcaacgcagagtacnngtgaggaanncatagcctnntttttttttttttttttttttttttttttt

SEQ ID NO: 2307 - DNA, 84 bp, synthetic construct
  source 1..84: mol_type = other DNA
tttttttaagcagtggtatcaacgcagagtacnngtgaggaannatcgagacnntttttttttttttttttttttttttttttt

SEQ ID NO: 2308 - DNA, 84 bp, synthetic construct
  source 1..84: mol_type = other DNA
tttttttaagcagtggtatcaacgcagagtacnngtgaggaannggaagagtnntttttttttttttttttttttttttttttt

SEQ ID NO: 2309 - DNA, 84 bp, synthetic construct
  source 1..84: mol_type = other DNA
tttttttaagcagtggtatcaacgcagagtacnngtgaggaannccaagtagnntttttttttttttttttttttttttttttt

SEQ ID NO: 2310 - DNA, 84 bp, synthetic construct
  source 1..84: mol_type = other DNA
tttttttaagcagtggtatcaacgcagagtacnngtgaggaannctgaacagnntttttttttttttttttttttttttttttt

SEQ ID NO: 2311 - DNA, 84 bp, synthetic construct
  source 1..84: mol_type = other DNA
tttttttaagcagtggtatcaacgcagagtacnngtgaggaanngtaggttcnntttttttttttttttttttttttttttttt

SEQ ID NO: 2312 - DNA, 84 bp, synthetic construct
  source 1..84: mol_type = other DNA
tttttttaagcagtggtatcaacgcagagtacnngtgaggaanngtatggacnntttttttttttttttttttttttttttttt

SEQ ID NO: 2313 - DNA, 84 bp, synthetic construct
  source 1..84: mol_type = other DNA
tttttttaagcagtggtatcaacgcagagtacnngtgaggaanntcgcaacanntttttttttttttttttttttttttttttt

SEQ ID NO: 2314 - DNA, 84 bp, synthetic construct
  source 1..84: mol_type = other DNA
tttttttaagcagtggtatcaacgcagagtacnngtgaggaannccgctaatnntttttttttttttttttttttttttttttt

SEQ ID NO: 2315 - DNA, 84 bp, synthetic construct
  source 1..84: mol_type = other DNA
tttttttaagcagtggtatcaacgcagagtacnngtgaggaanngattcgcanntttttttttttttttttttttttttttttt

SEQ ID NO: 2316 - DNA, 84 bp, synthetic construct
  source 1..84: mol_type = other DNA
tttttttaagcagtggtatcaacgcagagtacnngtgaggaanncgatggaanntttttttttttttttttttttttttttttt

SEQ ID NO: 2317 - DNA, 84 bp, synthetic construct
  source 1..84: mol_type = other DNA
tttttttaagcagtggtatcaacgcagagtacnngtgaggaannagcaagganntttttttttttttttttttttttttttttt

SEQ ID NO: 2318 - DNA, 84 bp, synthetic construct
  source 1..84: mol_type = other DNA
tttttttaagcagtggtatcaacgcagagtacnngtgaggaanncgtagcaanntttttttttttttttttttttttttttttt

SEQ ID NO: 2319 - DNA, 84 bp, synthetic construct
  source 1..84: mol_type = other DNA
tttttttaagcagtggtatcaacgcagagtacnngtgaggaanntggcagtanntttttttttttttttttttttttttttttt

SEQ ID NO: 2320 - DNA, 84 bp, synthetic construct
  source 1..84: mol_type = other DNA
tttttttaagcagtggtatcaacgcagagtacnngtgaggaanncggtagttnntttttttttttttttttttttttttttttt

SEQ ID NO: 2321 - DNA, 84 bp, synthetic construct
  source 1..84: mol_type = other DNA
tttttttaagcagtggtatcaacgcagagtacnngtgaggaanntgacttcgnntttttttttttttttttttttttttttttt

SEQ ID NO: 2322 - DNA, 84 bp, synthetic construct
  source 1..84: mol_type = other DNA
tttttttaagcagtggtatcaacgcagagtacnngtgaggaanngagtgcaanntttttttttttttttttttttttttttttt

SEQ ID NO: 2323 - DNA, 84 bp, synthetic construct
  source 1..84: mol_type = other DNA
tttttttaagcagtggtatcaacgcagagtacnngtgaggaannacggtaacnntttttttttttttttttttttttttttttt

SEQ ID NO: 2324 - DNA, 84 bp, synthetic construct
  source 1..84: mol_type = other DNA
tttttttaagcagtggtatcaacgcagagtacnngtgaggaannaagtggtgnntttttttttttttttttttttttttttttt

SEQ ID NO: 2325 - DNA, 84 bp, synthetic construct
  source 1..84: mol_type = other DNA
tttttttaagcagtggtatcaacgcagagtacnngtgaggaannggagacaanntttttttttttttttttttttttttttttt

SEQ ID NO: 2326 - DNA, 84 bp, synthetic construct
  source 1..84: mol_type = other DNA
tttttttaagcagtggtatcaacgcagagtacnngtgaggaanntcaaggacnntttttttttttttttttttttttttttttt

SEQ ID NO: 2327 - DNA, 84 bp, synthetic construct
  source 1..84: mol_type = other DNA
tttttttaagcagtggtatcaacgcagagtacnngtgaggaannaagagagcnntttttttttttttttttttttttttttttt

SEQ ID NO: 2328 - DNA, 84 bp, synthetic construct
  source 1..84: mol_type = other DNA
tttttttaagcagtggtatcaacgcagagtacnngtgaggaanncgagagatnntttttttttttttttttttttttttttttt

SEQ ID NO: 2329 - DNA, 84 bp, synthetic construct
  source 1..84: mol_type = other DNA
tttttttaagcagtggtatcaacgcagagtacnngtgaggaannacagatggnntttttttttttttttttttttttttttttt

SEQ ID NO: 2330 - DNA, 84 bp, synthetic construct
  source 1..84: mol_type = other DNA
tttttttaagcagtggtatcaacgcagagtacnngtgaggaannaggagtcanntttttttttttttttttttttttttttttt

SEQ ID NO: 2331 - DNA, 84 bp, synthetic construct
  source 1..84: mol_type = other DNA
tttttttaagcagtggtatcaacgcagagtacnngtgaggaanncgtgttacnntttttttttttttttttttttttttttttt

SEQ ID NO: 2332 - DNA, 84 bp, synthetic construct
  source 1..84: mol_type = other DNA
tttttttaagcagtggtatcaacgcagagtacnngtgaggaanntagtgtgcnntttttttttttttttttttttttttttttt

SEQ ID NO: 2333 - DNA, 84 bp, synthetic construct
  source 1..84: mol_type = other DNA
tttttttaagcagtggtatcaacgcagagtacnngtgaggaannctcatgacnntttttttttttttttttttttttttttttt

SEQ ID NO: 2334 - DNA, 84 bp, synthetic construct
  source 1..84: mol_type = other DNA
tttttttaagcagtggtatcaacgcagagtacnngtgaggaanngtatccagnntttttttttttttttttttttttttttttt

SEQ ID NO: 2335 - DNA, 84 bp, synthetic construct
  source 1..84: mol_type = other DNA
tttttttaagcagtggtatcaacgcagagtacnngtgaggaannacgcctatnntttttttttttttttttttttttttttttt

SEQ ID NO: 2336 - DNA, 84 bp, synthetic construct
  source 1..84: mol_type = other DNA
tttttttaagcagtggtatcaacgcagagtacnngtgaggaannaacgacctnntttttttttttttttttttttttttttttt

SEQ ID NO: 2337 - DNA, 84 bp, synthetic construct
  source 1..84: mol_type = other DNA
tttttttaagcagtggtatcaacgcagagtacnngtgaggaannatcaggctnntttttttttttttttttttttttttttttt

SEQ ID NO: 2338 - DNA, 84 bp, synthetic construct
  source 1..84: mol_type = other DNA
tttttttaagcagtggtatcaacgcagagtacnngtgaggaanncaagttcgnntttttttttttttttttttttttttttttt

SEQ ID NO: 2339 - DNA, 84 bp, synthetic construct
  source 1..84: mol_type = other DNA
tttttttaagcagtggtatcaacgcagagtacnngtgaggaanntagccaganntttttttttttttttttttttttttttttt

SEQ ID NO: 2340 - DNA, 84 bp, synthetic construct
  source 1..84: mol_type = other DNA
tttttttaagcagtggtatcaacgcagagtacnngtgaggaanncaatcacgnntttttttttttttttttttttttttttttt

SEQ ID NO: 2341 - DNA, 84 bp, synthetic construct
  source 1..84: mol_type = other DNA
tttttttaagcagtggtatcaacgcagagtacnngtgaggaanngcaacaagnntttttttttttttttttttttttttttttt

SEQ ID NO: 2342 - DNA, 84 bp, synthetic construct
  source 1..84: mol_type = other DNA
tttttttaagcagtggtatcaacgcagagtacnngtgaggaanncacgacaanntttttttttttttttttttttttttttttt

SEQ ID NO: 2343 - DNA, 84 bp, synthetic construct
  source 1..84: mol_type = other DNA
tttttttaagcagtggtatcaacgcagagtacnngtgaggaanntacggaganntttttttttttttttttttttttttttttt

SEQ ID NO: 2344 - DNA, 84 bp, synthetic construct
  source 1..84: mol_type = other DNA
tttttttaagcagtggtatcaacgcagagtacnngtgaggaanncgacaaganntttttttttttttttttttttttttttttt

SEQ ID NO: 2345 - DNA, 84 bp, synthetic construct
  source 1..84: mol_type = other DNA
tttttttaagcagtggtatcaacgcagagtacnngtgaggaanncgaagtganntttttttttttttttttttttttttttttt

SEQ ID NO: 2346 - DNA, 84 bp, synthetic construct
  source 1..84: mol_type = other DNA
tttttttaagcagtggtatcaacgcagagtacnngtgaggaannagctggtanntttttttttttttttttttttttttttttt

SEQ ID NO: 2347 - DNA, 84 bp, synthetic construct
  source 1..84: mol_type = other DNA
tttttttaagcagtggtatcaacgcagagtacnngtgaggaannaactaggcnntttttttttttttttttttttttttttttt

SEQ ID NO: 2348 - DNA, 84 bp, synthetic construct
  source 1..84: mol_type = other DNA
tttttttaagcagtggtatcaacgcagagtacnngtgaggaanncagcaagtnntttttttttttttttttttttttttttttt

SEQ ID NO: 2349 - DNA, 84 bp, synthetic construct
  source 1..84: mol_type = other DNA
tttttttaagcagtggtatcaacgcagagtacnngtgaggaannacgaggtanntttttttttttttttttttttttttttttt

SEQ ID NO: 2350 - DNA, 84 bp, synthetic construct
  source 1..84: mol_type = other DNA
tttttttaagcagtggtatcaacgcagagtacnngtgaggaanncatcttccnntttttttttttttttttttttttttttttt

SEQ ID NO: 2351 - DNA, 84 bp, synthetic construct
  source 1..84: mol_type = other DNA
tttttttaagcagtggtatcaacgcagagtacnngtgaggaanncctgaatcnntttttttttttttttttttttttttttttt

SEQ ID NO: 2352 - DNA, 84 bp, synthetic construct
  source 1..84: mol_type = other DNA
tttttttaagcagtggtatcaacgcagagtacnngtgaggaanntgcagactnntttttttttttttttttttttttttttttt

SEQ ID NO: 2353 - DNA, 84 bp, synthetic construct
  source 1..84: mol_type = other DNA
tttttttaagcagtggtatcaacgcagagtacnngtgaggaannagatgtggnntttttttttttttttttttttttttttttt

SEQ ID NO: 2354 - DNA, 84 bp, synthetic construct
  source 1..84: mol_type = other DNA
tttttttaagcagtggtatcaacgcagagtacnngtgaggaannagttcgacnntttttttttttttttttttttttttttttt

SEQ ID NO: 2355 - DNA, 84 bp, synthetic construct
  source 1..84: mol_type = other DNA
tttttttaagcagtggtatcaacgcagagtacnngtgaggaannacaacctcnntttttttttttttttttttttttttttttt

SEQ ID NO: 2356 - DNA, 84 bp, synthetic construct
  source 1..84: mol_type = other DNA
tttttttaagcagtggtatcaacgcagagtacnngtgaggaanncatggtagnntttttttttttttttttttttttttttttt

SEQ ID NO: 2357 - DNA, 84 bp, synthetic construct
  source 1..84: mol_type = other DNA
tttttttaagcagtggtatcaacgcagagtacnngtgaggaanncgtatctcnntttttttttttttttttttttttttttttt

SEQ ID NO: 2358 - DNA, 84 bp, synthetic construct
  source 1..84: mol_type = other DNA
tttttttaagcagtggtatcaacgcagagtacnngtgaggaanncctagttcnntttttttttttttttttttttttttttttt

SEQ ID NO: 2359 - DNA, 84 bp, synthetic construct
  source 1..84: mol_type = other DNA
tttttttaagcagtggtatcaacgcagagtacnngtgaggaanncaagagtcnntttttttttttttttttttttttttttttt

SEQ ID NO: 2360 - DNA, 84 bp, synthetic construct
  source 1..84: mol_type = other DNA
tttttttaagcagtggtatcaacgcagagtacnnaggagatgnnaatcggcanntttttttttttttttttttttttttttttt

SEQ ID NO: 2361 - DNA, 84 bp, synthetic construct
  source 1..84: mol_type = other DNA
tttttttaagcagtggtatcaacgcagagtacnnaggagatgnntacggcatnntttttttttttttttttttttttttttttt

SEQ ID NO: 2362 - DNA, 84 bp, synthetic construct
  source 1..84: mol_type = other DNA
tttttttaagcagtggtatcaacgcagagtacnnaggagatgnnttggatcgnntttttttttttttttttttttttttttttt

SEQ ID NO: 2363 - DNA, 84 bp, synthetic construct
  source 1..84: mol_type = other DNA
tttttttaagcagtggtatcaacgcagagtacnnaggagatgnntggaacganntttttttttttttttttttttttttttttt

SEQ ID NO: 2364 - DNA, 84 bp, synthetic construct
  source 1..84: mol_type = other DNA
tttttttaagcagtggtatcaacgcagagtacnnaggagatgnnggcaatcanntttttttttttttttttttttttttttttt

SEQ ID NO: 2365 - DNA, 84 bp, synthetic construct
  source 1..84: mol_type = other DNA
tttttttaagcagtggtatcaacgcagagtacnnaggagatgnngaatccganntttttttttttttttttttttttttttttt

SEQ ID NO: 2366 - DNA, 84 bp, synthetic construct
  source 1..84: mol_type = other DNA
tttttttaagcagtggtatcaacgcagagtacnnaggagatgnnttacggtgnntttttttttttttttttttttttttttttt

SEQ ID NO: 2367 - DNA, 84 bp, synthetic construct
  source 1..84: mol_type = other DNA
tttttttaagcagtggtatcaacgcagagtacnnaggagatgnncatatcggnntttttttttttttttttttttttttttttt

SEQ ID NO: 2368 - DNA, 84 bp, synthetic construct
  source 1..84: mol_type = other DNA
tttttttaagcagtggtatcaacgcagagtacnnaggagatgnncttcggtanntttttttttttttttttttttttttttttt

SEQ ID NO: 2369 - DNA, 84 bp, synthetic construct
  source 1..84: mol_type = other DNA
tttttttaagcagtggtatcaacgcagagtacnnaggagatgnntcctaacgnntttttttttttttttttttttttttttttt

SEQ ID NO: 2370 - DNA, 84 bp, synthetic construct
  source 1..84: mol_type = other DNA
tttttttaagcagtggtatcaacgcagagtacnnaggagatgnngtaagccanntttttttttttttttttttttttttttttt

SEQ ID NO: 2371 - DNA, 84 bp, synthetic construct
  source 1..84: mol_type = other DNA
tttttttaagcagtggtatcaacgcagagtacnnaggagatgnntaaggtggnntttttttttttttttttttttttttttttt

SEQ ID NO: 2372 - DNA, 84 bp, synthetic construct
  source 1..84: mol_type = other DNA
tttttttaagcagtggtatcaacgcagagtacnnaggagatgnnggtaagctnntttttttttttttttttttttttttttttt

SEQ ID NO: 2373 - DNA, 84 bp, synthetic construct
  source 1..84: mol_type = other DNA
tttttttaagcagtggtatcaacgcagagtacnnaggagatgnntgtgtcganntttttttttttttttttttttttttttttt

SEQ ID NO: 2374 - DNA, 84 bp, synthetic construct
  source 1..84: mol_type = other DNA
tttttttaagcagtggtatcaacgcagagtacnnaggagatgnngagcatganntttttttttttttttttttttttttttttt

SEQ ID NO: 2375 - DNA, 84 bp, synthetic construct
  source 1..84: mol_type = other DNA
tttttttaagcagtggtatcaacgcagagtacnnaggagatgnntcgaagtcnntttttttttttttttttttttttttttttt

SEQ ID NO: 2376 - DNA, 84 bp, synthetic construct
  source 1..84: mol_type = other DNA
tttttttaagcagtggtatcaacgcagagtacnnaggagatgnnggtgaacanntttttttttttttttttttttttttttttt

SEQ ID NO: 2377 - DNA, 84 bp, synthetic construct
  source 1..84: mol_type = other DNA
tttttttaagcagtggtatcaacgcagagtacnnaggagatgnnacatgcacnntttttttttttttttttttttttttttttt

SEQ ID NO: 2378 - DNA, 84 bp, synthetic construct
  source 1..84: mol_type = other DNA
tttttttaagcagtggtatcaacgcagagtacnnaggagatgnnccaacagtnntttttttttttttttttttttttttttttt

SEQ ID NO: 2379 - DNA, 84 bp, synthetic construct
  source 1..84: mol_type = other DNA
tttttttaagcagtggtatcaacgcagagtacnnaggagatgnnagaacagcnntttttttttttttttttttttttttttttt

SEQ ID NO: 2380 - DNA, 84 bp, synthetic construct
  source 1..84: mol_type = other DNA
tttttttaagcagtggtatcaacgcagagtacnnaggagatgnngaacacgtnntttttttttttttttttttttttttttttt

SEQ ID NO: 2381 - DNA, 84 bp, synthetic construct
  source 1..84: mol_type = other DNA
tttttttaagcagtggtatcaacgcagagtacnnaggagatgnnggtcttcanntttttttttttttttttttttttttttttt

SEQ ID NO: 2382 - DNA, 84 bp, synthetic construct
  source 1..84: mol_type = other DNA
tttttttaagcagtggtatcaacgcagagtacnnaggagatgnnaggttcagnntttttttttttttttttttttttttttttt

SEQ ID NO: 2383 - DNA, 84 bp, synthetic construct
  source 1..84: mol_type = other DNA
tttttttaagcagtggtatcaacgcagagtacnnaggagatgnnctagagcanntttttttttttttttttttttttttttttt

SEQ ID NO: 2384 - DNA, 84 bp, synthetic construct
  source 1..84: mol_type = other DNA
tttttttaagcagtggtatcaacgcagagtacnnaggagatgnncttctagcnntttttttttttttttttttttttttttttt

SEQ ID NO: 2385 - DNA, 84 bp, synthetic construct
  source 1..84: mol_type = other DNA
tttttttaagcagtggtatcaacgcagagtacnnaggagatgnngagtaacgnntttttttttttttttttttttttttttttt

SEQ ID NO: 2386 - DNA, 84 bp, synthetic construct
  source 1..84: mol_type = other DNA
tttttttaagcagtggtatcaacgcagagtacnnaggagatgnnctaagaggnntttttttttttttttttttttttttttttt

SEQ ID NO: 2387 - DNA, 84 bp, synthetic construct
  source 1..84: mol_type = other DNA
tttttttaagcagtggtatcaacgcagagtacnnaggagatgnnacgtgtagnntttttttttttttttttttttttttttttt

SEQ ID NO: 2388 - DNA, 84 bp, synthetic construct
  source 1..84: mol_type = other DNA
tttttttaagcagtggtatcaacgcagagtacnnaggagatgnnactacaggnntttttttttttttttttttttttttttttt

SEQ ID NO: 2389 - DNA, 84 bp, synthetic construct
  source 1..84: mol_type = other DNA
tttttttaagcagtggtatcaacgcagagtacnnaggagatgnntacaggtcnntttttttttttttttttttttttttttttt

SEQ ID NO: 2390 - DNA, 84 bp, synthetic construct
  source 1..84: mol_type = other DNA
tttttttaagcagtggtatcaacgcagagtacnnaggagatgnnctcacatgnntttttttttttttttttttttttttttttt

SEQ ID NO: 2391 - DNA, 84 bp, synthetic construct
  source 1..84: mol_type = other DNA
tttttttaagcagtggtatcaacgcagagtacnnaggagatgnnactaggagnntttttttttttttttttttttttttttttt

SEQ ID NO: 2392 - DNA, 84 bp, synthetic construct
  source 1..84: mol_type = other DNA
tttttttaagcagtggtatcaacgcagagtacnnaggagatgnnccatagganntttttttttttttttttttttttttttttt

SEQ ID NO: 2393 - DNA, 84 bp, synthetic construct
  source 1..84: mol_type = other DNA
tttttttaagcagtggtatcaacgcagagtacnnaggagatgnnggagaatcnntttttttttttttttttttttttttttttt

SEQ ID NO: 2394 - DNA, 84 bp, synthetic construct
  source 1..84: mol_type = other DNA
tttttttaagcagtggtatcaacgcagagtacnnaggagatgnngccaagaanntttttttttttttttttttttttttttttt

SEQ ID NO: 2395 - DNA, 84 bp, synthetic construct
  source 1..84: mol_type = other DNA
tttttttaagcagtggtatcaacgcagagtacnnaggagatgnnaaggcaagnntttttttttttttttttttttttttttttt

SEQ ID NO: 2396 - DNA, 84 bp, synthetic construct
  source 1..84: mol_type = other DNA
tttttttaagcagtggtatcaacgcagagtacnnaggagatgnnaatgtcgcnntttttttttttttttttttttttttttttt

SEQ ID NO: 2397 - DNA, 84 bp, synthetic construct
  source 1..84: mol_type = other DNA
tttttttaagcagtggtatcaacgcagagtacnnaggagatgnnatggaaccnntttttttttttttttttttttttttttttt

SEQ ID NO: 2398 - DNA, 84 bp, synthetic construct
  source 1..84: mol_type = other DNA
tttttttaagcagtggtatcaacgcagagtacnnaggagatgnnagaggcatnntttttttttttttttttttttttttttttt

SEQ ID NO: 2399 - DNA, 84 bp, synthetic construct
  source 1..84: mol_type = other DNA
tttttttaagcagtggtatcaacgcagagtacnnaggagatgnntgcatagcnntttttttttttttttttttttttttttttt

SEQ ID NO: 2400 - DNA, 84 bp, synthetic construct
  source 1..84: mol_type = other DNA
tttttttaagcagtggtatcaacgcagagtacnnaggagatgnnctaacgganntttttttttttttttttttttttttttttt

SEQ ID NO: 2401 - DNA, 84 bp, synthetic construct
  source 1..84: mol_type = other DNA
tttttttaagcagtggtatcaacgcagagtacnnaggagatgnntatcgaggnntttttttttttttttttttttttttttttt

SEQ ID NO: 2402 - DNA, 84 bp, synthetic construct
  source 1..84: mol_type = other DNA
tttttttaagcagtggtatcaacgcagagtacnnaggagatgnncatagcctnntttttttttttttttttttttttttttttt

SEQ ID NO: 2403 - DNA, 84 bp, synthetic construct
  source 1..84: mol_type = other DNA
tttttttaagcagtggtatcaacgcagagtacnnaggagatgnnatcgagacnntttttttttttttttttttttttttttttt

SEQ ID NO: 2404 - DNA, 84 bp, synthetic construct
  source 1..84: mol_type = other DNA
tttttttaagcagtggtatcaacgcagagtacnnaggagatgnnggaagagtnntttttttttttttttttttttttttttttt

SEQ ID NO: 2405 - DNA, 84 bp, synthetic construct
  source 1..84: mol_type = other DNA
tttttttaagcagtggtatcaacgcagagtacnnaggagatgnnccaagtagnntttttttttttttttttttttttttttttt

SEQ ID NO: 2406 - DNA, 84 bp, synthetic construct
  source 1..84: mol_type = other DNA
tttttttaagcagtggtatcaacgcagagtacnnaggagatgnnctgaacagnntttttttttttttttttttttttttttttt

SEQ ID NO: 2407 - DNA, 84 bp, synthetic construct
  source 1..84: mol_type = other DNA
tttttttaagcagtggtatcaacgcagagtacnnaggagatgnngtaggttcnntttttttttttttttttttttttttttttt

SEQ ID NO: 2408 - DNA, 84 bp, synthetic construct
  source 1..84: mol_type = other DNA
tttttttaagcagtggtatcaacgcagagtacnnaggagatgnngtatggacnntttttttttttttttttttttttttttttt

SEQ ID NO: 2409 - DNA, 84 bp, synthetic construct
  source 1..84: mol_type = other DNA
tttttttaagcagtggtatcaacgcagagtacnnaggagatgnntcgcaacanntttttttttttttttttttttttttttttt

SEQ ID NO: 2410 - DNA, 84 bp, synthetic construct
  source 1..84: mol_type = other DNA
tttttttaagcagtggtatcaacgcagagtacnnaggagatgnnccgctaatnntttttttttttttttttttttttttttttt

SEQ ID NO: 2411 - DNA, 84 bp, synthetic construct
  source 1..84: mol_type = other DNA
tttttttaagcagtggtatcaacgcagagtacnnaggagatgnngattcgcanntttttttttttttttttttttttttttttt

SEQ ID NO: 2412 - DNA, 84 bp, synthetic construct
  source 1..84: mol_type = other DNA
tttttttaagcagtggtatcaacgcagagtacnnaggagatgnncgatggaanntttttttttttttttttttttttttttttt

SEQ ID NO: 2413 - DNA, 84 bp, synthetic construct
  source 1..84: mol_type = other DNA
tttttttaagcagtggtatcaacgcagagtacnnaggagatgnnagcaagganntttttttttttttttttttttttttttttt

SEQ ID NO: 2414 - DNA, 84 bp, synthetic construct
  source 1..84: mol_type = other DNA
tttttttaagcagtggtatcaacgcagagtacnnaggagatgnncgtagcaanntttttttttttttttttttttttttttttt

SEQ ID NO: 2415 - DNA, 84 bp, synthetic construct
  source 1..84: mol_type = other DNA
tttttttaagcagtggtatcaacgcagagtacnnaggagatgnntggcagtanntttttttttttttttttttttttttttttt

SEQ ID NO: 2416 - DNA, 84 bp, synthetic construct
  source 1..84: mol_type = other DNA
tttttttaagcagtggtatcaacgcagagtacnnaggagatgnncggtagttnntttttttttttttttttttttttttttttt

SEQ ID NO: 2417 - DNA, 84 bp, synthetic construct
  source 1..84: mol_type = other DNA
tttttttaagcagtggtatcaacgcagagtacnnaggagatgnntgacttcgnntttttttttttttttttttttttttttttt

SEQ ID NO: 2418 - DNA, 84 bp, synthetic construct
  source 1..84: mol_type = other DNA
tttttttaagcagtggtatcaacgcagagtacnnaggagatgnngagtgcaanntttttttttttttttttttttttttttttt

SEQ ID NO: 2419 - DNA, 84 bp, synthetic construct
  source 1..84: mol_type = other DNA
tttttttaagcagtggtatcaacgcagagtacnnaggagatgnnacggtaacnntttttttttttttttttttttttttttttt

SEQ ID NO: 2420 - DNA, 84 bp, synthetic construct
  source 1..84: mol_type = other DNA
tttttttaagcagtggtatcaacgcagagtacnnaggagatgnnaagtggtgnntttttttttttttttttttttttttttttt

SEQ ID NO: 2421 - DNA, 84 bp, synthetic construct
  source 1..84: mol_type = other DNA
tttttttaagcagtggtatcaacgcagagtacnnaggagatgnnggagacaanntttttttttttttttttttttttttttttt

SEQ ID NO: 2422 - DNA, 84 bp, synthetic construct
  source 1..84: mol_type = other DNA
tttttttaagcagtggtatcaacgcagagtacnnaggagatgnntcaaggacnntttttttttttttttttttttttttttttt

SEQ ID NO: 2423 - DNA, 84 bp, synthetic construct
  source 1..84: mol_type = other DNA
tttttttaagcagtggtatcaacgcagagtacnnaggagatgnnaagagagcnntttttttttttttttttttttttttttttt

SEQ ID NO: 2424 - DNA, 84 bp, synthetic construct
  source 1..84: mol_type = other DNA
tttttttaagcagtggtatcaacgcagagtacnnaggagatgnncgagagatnntttttttttttttttttttttttttttttt

SEQ ID NO: 2425 - DNA, 84 bp, synthetic construct
  source 1..84: mol_type = other DNA
tttttttaagcagtggtatcaacgcagagtacnnaggagatgnnacagatggnntttttttttttttttttttttttttttttt

SEQ ID NO: 2426 - DNA, 84 bp, synthetic construct
  source 1..84: mol_type = other DNA
tttttttaagcagtggtatcaacgcagagtacnnaggagatgnnaggagtcanntttttttttttttttttttttttttttttt

SEQ ID NO: 2427 - DNA, 84 bp, synthetic construct
  source 1..84: mol_type = other DNA
tttttttaagcagtggtatcaacgcagagtacnnaggagatgnncgtgttacnntttttttttttttttttttttttttttttt

SEQ ID NO: 2428 - DNA, 84 bp, synthetic construct
  source 1..84: mol_type = other DNA
tttttttaagcagtggtatcaacgcagagtacnnaggagatgnntagtgtgcnntttttttttttttttttttttttttttttt

SEQ ID NO: 2429 - DNA, 84 bp, synthetic construct
  source 1..84: mol_type = other DNA
tttttttaagcagtggtatcaacgcagagtacnnaggagatgnnctcatgacnntttttttttttttttttttttttttttttt

SEQ ID NO: 2430 - DNA, 84 bp, synthetic construct
  source 1..84: mol_type = other DNA
tttttttaagcagtggtatcaacgcagagtacnnaggagatgnngtatccagnntttttttttttttttttttttttttttttt

SEQ ID NO: 2431 - DNA, 84 bp, synthetic construct
  source 1..84: mol_type = other DNA
tttttttaagcagtggtatcaacgcagagtacnnaggagatgnnacgcctatnntttttttttttttttttttttttttttttt

SEQ ID NO: 2432 - DNA, 84 bp, synthetic construct
  source 1..84: mol_type = other DNA
tttttttaagcagtggtatcaacgcagagtacnnaggagatgnnaacgacctnntttttttttttttttttttttttttttttt

SEQ ID NO: 2433 - DNA, 84 bp, synthetic construct
  source 1..84: mol_type = other DNA
tttttttaagcagtggtatcaacgcagagtacnnaggagatgnnatcaggctnntttttttttttttttttttttttttttttt

SEQ ID NO: 2434 - DNA, 84 bp, synthetic construct
  source 1..84: mol_type = other DNA
tttttttaagcagtggtatcaacgcagagtacnnaggagatgnncaagttcgnntttttttttttttttttttttttttttttt

SEQ ID NO: 2435 - DNA, 84 bp, synthetic construct
  source 1..84: mol_type = other DNA
tttttttaagcagtggtatcaacgcagagtacnnaggagatgnntagccaganntttttttttttttttttttttttttttttt

SEQ ID NO: 2436 - DNA, 84 bp, synthetic construct
  source 1..84: mol_type = other DNA
tttttttaagcagtggtatcaacgcagagtacnnaggagatgnncaatcacgnntttttttttttttttttttttttttttttt

SEQ ID NO: 2437 - DNA, 84 bp, synthetic construct
  source 1..84: mol_type = other DNA
tttttttaagcagtggtatcaacgcagagtacnnaggagatgnngcaacaagnntttttttttttttttttttttttttttttt

SEQ ID NO: 2438 - DNA, 84 bp, synthetic construct
  source 1..84: mol_type = other DNA
tttttttaagcagtggtatcaacgcagagtacnnaggagatgnncacgacaanntttttttttttttttttttttttttttttt

SEQ ID NO: 2439 - DNA, 84 bp, synthetic construct
  source 1..84: mol_type = other DNA
tttttttaagcagtggtatcaacgcagagtacnnaggagatgnntacggaganntttttttttttttttttttttttttttttt

SEQ ID NO: 2440 - DNA, 84 bp, synthetic construct
  source 1..84: mol_type = other DNA
tttttttaagcagtggtatcaacgcagagtacnnaggagatgnncgacaaganntttttttttttttttttttttttttttttt

SEQ ID NO: 2441 - DNA, 84 bp, synthetic construct
  source 1..84: mol_type = other DNA
tttttttaagcagtggtatcaacgcagagtacnnaggagatgnncgaagtganntttttttttttttttttttttttttttttt

SEQ ID NO: 2442 - DNA, 84 bp, synthetic construct
  source 1..84: mol_type = other DNA
tttttttaagcagtggtatcaacgcagagtacnnaggagatgnnagctggtanntttttttttttttttttttttttttttttt

SEQ ID NO: 2443 - DNA, 84 bp, synthetic construct
  source 1..84: mol_type = other DNA
tttttttaagcagtggtatcaacgcagagtacnnaggagatgnnaactaggcnntttttttttttttttttttttttttttttt

SEQ ID NO: 2444 - DNA, 84 bp, synthetic construct
  source 1..84: mol_type = other DNA
tttttttaagcagtggtatcaacgcagagtacnnaggagatgnncagcaagtnntttttttttttttttttttttttttttttt

SEQ ID NO: 2445 - DNA, 84 bp, synthetic construct
  source 1..84: mol_type = other DNA
tttttttaagcagtggtatcaacgcagagtacnnaggagatgnnacgaggtanntttttttttttttttttttttttttttttt

SEQ ID NO: 2446 - DNA, 84 bp, synthetic construct
  source 1..84: mol_type = other DNA
tttttttaagcagtggtatcaacgcagagtacnnaggagatgnncatcttccnntttttttttttttttttttttttttttttt

SEQ ID NO: 2447 - DNA, 84 bp, synthetic construct
  source 1..84: mol_type = other DNA
tttttttaagcagtggtatcaacgcagagtacnnaggagatgnncctgaatcnntttttttttttttttttttttttttttttt

SEQ ID NO: 2448 - DNA, 84 bp, synthetic construct
  source 1..84: mol_type = other DNA
tttttttaagcagtggtatcaacgcagagtacnnaggagatgnntgcagactnntttttttttttttttttttttttttttttt

SEQ ID NO: 2449 - DNA, 84 bp, synthetic construct
  source 1..84: mol_type = other DNA
tttttttaagcagtggtatcaacgcagagtacnnaggagatgnnagatgtggnntttttttttttttttttttttttttttttt

SEQ ID NO: 2450 - DNA, 84 bp, synthetic construct
  source 1..84: mol_type = other DNA
tttttttaagcagtggtatcaacgcagagtacnnaggagatgnnagttcgacnntttttttttttttttttttttttttttttt

SEQ ID NO: 2451 - DNA, 84 bp, synthetic construct
  source 1..84: mol_type = other DNA
tttttttaagcagtggtatcaacgcagagtacnnaggagatgnnacaacctcnntttttttttttttttttttttttttttttt

SEQ ID NO: 2452 - DNA, 84 bp, synthetic construct
  source 1..84: mol_type = other DNA
tttttttaagcagtggtatcaacgcagagtacnnaggagatgnncatggtagnntttttttttttttttttttttttttttttt

SEQ ID NO: 2453 - DNA, 84 bp, synthetic construct
  source 1..84: mol_type = other DNA
tttttttaagcagtggtatcaacgcagagtacnnaggagatgnncgtatctcnntttttttttttttttttttttttttttttt

SEQ ID NO: 2454 - DNA, 84 bp, synthetic construct
  source 1..84: mol_type = other DNA
tttttttaagcagtggtatcaacgcagagtacnnaggagatgnncctagttcnntttttttttttttttttttttttttttttt

SEQ ID NO: 2455 - DNA, 84 bp, synthetic construct
  source 1..84: mol_type = other DNA
tttttttaagcagtggtatcaacgcagagtacnnaggagatgnncaagagtcnntttttttttttttttttttttttttttttt

SEQ ID NO: 2456 - DNA, 84 bp, synthetic construct
  source 1..84: mol_type = other DNA
tttttttaagcagtggtatcaacgcagagtacnnaaggcctannaatcggcanntttttttttttttttttttttttttttttt

SEQ ID NO: 2457 - DNA, 84 bp, synthetic construct
  source 1..84: mol_type = other DNA
tttttttaagcagtggtatcaacgcagagtacnnaaggcctanntacggcatnntttttttttttttttttttttttttttttt

SEQ ID NO: 2458 - DNA, 84 bp, synthetic construct
  source 1..84: mol_type = other DNA
tttttttaagcagtggtatcaacgcagagtacnnaaggcctannttggatcgnntttttttttttttttttttttttttttttt

SEQ ID NO: 2459 - DNA, 84 bp, synthetic construct
  source 1..84: mol_type = other DNA
tttttttaagcagtggtatcaacgcagagtacnnaaggcctanntggaacganntttttttttttttttttttttttttttttt

SEQ ID NO: 2460 - DNA, 84 bp, synthetic construct
  source 1..84: mol_type = other DNA
tttttttaagcagtggtatcaacgcagagtacnnaaggcctannggcaatcanntttttttttttttttttttttttttttttt

SEQ ID NO: 2461 - DNA, 84 bp, synthetic construct
  source 1..84: mol_type = other DNA
tttttttaagcagtggtatcaacgcagagtacnnaaggcctanngaatccganntttttttttttttttttttttttttttttt

SEQ ID NO: 2462 - DNA, 84 bp, synthetic construct
  source 1..84: mol_type = other DNA
tttttttaagcagtggtatcaacgcagagtacnnaaggcctannttacggtgnntttttttttttttttttttttttttttttt

SEQ ID NO: 2463 - DNA, 84 bp, synthetic construct
  source 1..84: mol_type = other DNA
tttttttaagcagtggtatcaacgcagagtacnnaaggcctanncatatcggnntttttttttttttttttttttttttttttt

SEQ ID NO: 2464 - DNA, 84 bp, synthetic construct
  source 1..84: mol_type = other DNA
tttttttaagcagtggtatcaacgcagagtacnnaaggcctanncttcggtanntttttttttttttttttttttttttttttt

SEQ ID NO: 2465 - DNA, 84 bp, synthetic construct
  source 1..84: mol_type = other DNA
tttttttaagcagtggtatcaacgcagagtacnnaaggcctanntcctaacgnntttttttttttttttttttttttttttttt

SEQ ID NO: 2466 - DNA, 84 bp, synthetic construct
  source 1..84: mol_type = other DNA
tttttttaagcagtggtatcaacgcagagtacnnaaggcctanngtaagccanntttttttttttttttttttttttttttttt

SEQ ID NO: 2467 - DNA, 84 bp, synthetic construct
  source 1..84: mol_type = other DNA
tttttttaagcagtggtatcaacgcagagtacnnaaggcctanntaaggtggnntttttttttttttttttttttttttttttt

SEQ ID NO: 2468 - DNA, 84 bp, synthetic construct
  source 1..84: mol_type = other DNA
tttttttaagcagtggtatcaacgcagagtacnnaaggcctannggtaagctnntttttttttttttttttttttttttttttt

SEQ ID NO: 2469 - DNA, 84 bp, synthetic construct
  source 1..84: mol_type = other DNA
tttttttaagcagtggtatcaacgcagagtacnnaaggcctanntgtgtcganntttttttttttttttttttttttttttttt

SEQ ID NO: 2470 - DNA, 84 bp, synthetic construct
  source 1..84: mol_type = other DNA
tttttttaagcagtggtatcaacgcagagtacnnaaggcctanngagcatganntttttttttttttttttttttttttttttt

SEQ ID NO: 2471 - DNA, 84 bp, synthetic construct
  source 1..84: mol_type = other DNA
tttttttaagcagtggtatcaacgcagagtacnnaaggcctanntcgaagtcnntttttttttttttttttttttttttttttt

SEQ ID NO: 2472 - DNA, 84 bp, synthetic construct
  source 1..84: mol_type = other DNA
tttttttaagcagtggtatcaacgcagagtacnnaaggcctannggtgaacanntttttttttttttttttttttttttttttt

SEQ ID NO: 2473 - DNA, 84 bp, synthetic construct
  source 1..84: mol_type = other DNA
tttttttaagcagtggtatcaacgcagagtacnnaaggcctannacatgcacnntttttttttttttttttttttttttttttt

SEQ ID NO: 2474 - DNA, 84 bp, synthetic construct
  source 1..84: mol_type = other DNA
tttttttaagcagtggtatcaacgcagagtacnnaaggcctannccaacagtnntttttttttttttttttttttttttttttt

SEQ ID NO: 2475 - DNA, 84 bp, synthetic construct
  source 1..84: mol_type = other DNA
tttttttaagcagtggtatcaacgcagagtacnnaaggcctannagaacagcnntttttttttttttttttttttttttttttt

SEQ ID NO: 2476 - DNA, 84 bp, synthetic construct
  source 1..84: mol_type = other DNA
tttttttaagcagtggtatcaacgcagagtacnnaaggcctanngaacacgtnntttttttttttttttttttttttttttttt

SEQ ID NO: 2477 - DNA, 84 bp, synthetic construct
  source 1..84: mol_type = other DNA
tttttttaagcagtggtatcaacgcagagtacnnaaggcctannggtcttcanntttttttttttttttttttttttttttttt

SEQ ID NO: 2478 - DNA, 84 bp, synthetic construct
  source 1..84: mol_type = other DNA
tttttttaagcagtggtatcaacgcagagtacnnaaggcctannaggttcagnntttttttttttttttttttttttttttttt

SEQ ID NO: 2479 - DNA, 84 bp, synthetic construct
  source 1..84: mol_type = other DNA
tttttttaagcagtggtatcaacgcagagtacnnaaggcctannctagagcanntttttttttttttttttttttttttttttt

SEQ ID NO: 2480 - DNA, 84 bp, synthetic construct
  source 1..84: mol_type = other DNA
tttttttaagcagtggtatcaacgcagagtacnnaaggcctanncttctagcnntttttttttttttttttttttttttttttt

SEQ ID NO: 2481 - DNA, 84 bp, synthetic construct
  source 1..84: mol_type = other DNA
tttttttaagcagtggtatcaacgcagagtacnnaaggcctanngagtaacgnntttttttttttttttttttttttttttttt

SEQ ID NO: 2482 - DNA, 84 bp, synthetic construct
  source 1..84: mol_type = other DNA
tttttttaagcagtggtatcaacgcagagtacnnaaggcctannctaagaggnntttttttttttttttttttttttttttttt

SEQ ID NO: 2483 - DNA, 84 bp, synthetic construct
  source 1..84: mol_type = other DNA
tttttttaagcagtggtatcaacgcagagtacnnaaggcctannacgtgtagnntttttttttttttttttttttttttttttt

SEQ ID NO: 2484 - DNA, 84 bp, synthetic construct
  source 1..84: mol_type = other DNA
tttttttaagcagtggtatcaacgcagagtacnnaaggcctannactacaggnntttttttttttttttttttttttttttttt

SEQ ID NO: 2485 - DNA, 84 bp, synthetic construct
  source 1..84: mol_type = other DNA
tttttttaagcagtggtatcaacgcagagtacnnaaggcctanntacaggtcnntttttttttttttttttttttttttttttt

SEQ ID NO: 2486 - DNA, 84 bp, synthetic construct
  source 1..84: mol_type = other DNA
tttttttaagcagtggtatcaacgcagagtacnnaaggcctannctcacatgnntttttttttttttttttttttttttttttt

SEQ ID NO: 2487 - DNA, 84 bp, synthetic construct
  source 1..84: mol_type = other DNA
tttttttaagcagtggtatcaacgcagagtacnnaaggcctannactaggagnntttttttttttttttttttttttttttttt

SEQ ID NO: 2488 - DNA, 84 bp, synthetic construct
  source 1..84: mol_type = other DNA
tttttttaagcagtggtatcaacgcagagtacnnaaggcctannccatagganntttttttttttttttttttttttttttttt

SEQ ID NO: 2489 - DNA, 84 bp, synthetic construct
  source 1..84: mol_type = other DNA
tttttttaagcagtggtatcaacgcagagtacnnaaggcctannggagaatcnntttttttttttttttttttttttttttttt

SEQ ID NO: 2490 - DNA, 84 bp, synthetic construct
  source 1..84: mol_type = other DNA
tttttttaagcagtggtatcaacgcagagtacnnaaggcctanngccaagaanntttttttttttttttttttttttttttttt

SEQ ID NO: 2491 - DNA, 84 bp, synthetic construct
  source 1..84: mol_type = other DNA
tttttttaagcagtggtatcaacgcagagtacnnaaggcctannaaggcaagnntttttttttttttttttttttttttttttt

SEQ ID NO: 2492 - DNA, 84 bp, synthetic construct
  source 1..84: mol_type = other DNA
tttttttaagcagtggtatcaacgcagagtacnnaaggcctannaatgtcgcnntttttttttttttttttttttttttttttt

SEQ ID NO: 2493 - DNA, 84 bp, synthetic construct
  source 1..84: mol_type = other DNA
tttttttaagcagtggtatcaacgcagagtacnnaaggcctannatggaaccnntttttttttttttttttttttttttttttt

SEQ ID NO: 2494 - DNA, 84 bp, synthetic construct
  source 1..84: mol_type = other DNA
tttttttaagcagtggtatcaacgcagagtacnnaaggcctannagaggcatnntttttttttttttttttttttttttttttt

SEQ ID NO: 2495 - DNA, 84 bp, synthetic construct
  source 1..84: mol_type = other DNA
tttttttaagcagtggtatcaacgcagagtacnnaaggcctanntgcatagcnntttttttttttttttttttttttttttttt

SEQ ID NO: 2496 - DNA, 84 bp, synthetic construct
  source 1..84: mol_type = other DNA
tttttttaagcagtggtatcaacgcagagtacnnaaggcctannctaacgganntttttttttttttttttttttttttttttt

SEQ ID NO: 2497 - DNA, 84 bp, synthetic construct
  source 1..84: mol_type = other DNA
tttttttaagcagtggtatcaacgcagagtacnnaaggcctanntatcgaggnntttttttttttttttttttttttttttttt

SEQ ID NO: 2498 - DNA, 84 bp, synthetic construct
  source 1..84: mol_type = other DNA
tttttttaagcagtggtatcaacgcagagtacnnaaggcctanncatagcctnntttttttttttttttttttttttttttttt

SEQ ID NO: 2499 - DNA, 84 bp, synthetic construct
  source 1..84: mol_type = other DNA
tttttttaagcagtggtatcaacgcagagtacnnaaggcctannatcgagacnntttttttttttttttttttttttttttttt

SEQ ID NO: 2500 - DNA, 84 bp, synthetic construct
  source 1..84: mol_type = other DNA
tttttttaagcagtggtatcaacgcagagtacnnaaggcctannggaagagtnntttttttttttttttttttttttttttttt

SEQ ID NO: 2501 - DNA, 84 bp, synthetic construct
  source 1..84: mol_type = other DNA
tttttttaagcagtggtatcaacgcagagtacnnaaggcctannccaagtagnntttttttttttttttttttttttttttttt

SEQ ID NO: 2502 - DNA, 84 bp, synthetic construct
  source 1..84: mol_type = other DNA
tttttttaagcagtggtatcaacgcagagtacnnaaggcctannctgaacagnntttttttttttttttttttttttttttttt

SEQ ID NO: 2503 - DNA, 84 bp, synthetic construct
  source 1..84: mol_type = other DNA
tttttttaagcagtggtatcaacgcagagtacnnaaggcctanngtaggttcnntttttttttttttttttttttttttttttt

SEQ ID NO: 2504 - DNA, 84 bp, synthetic construct
  source 1..84: mol_type = other DNA
tttttttaagcagtggtatcaacgcagagtacnnaaggcctanngtatggacnntttttttttttttttttttttttttttttt

SEQ ID NO: 2505 - DNA, 84 bp, synthetic construct
  source 1..84: mol_type = other DNA
tttttttaagcagtggtatcaacgcagagtacnnaaggcctanntcgcaacanntttttttttttttttttttttttttttttt

SEQ ID NO: 2506 - DNA, 84 bp, synthetic construct
  source 1..84: mol_type = other DNA
tttttttaagcagtggtatcaacgcagagtacnnaaggcctannccgctaatnntttttttttttttttttttttttttttttt

SEQ ID NO: 2507 - DNA, 84 bp, synthetic construct
  source 1..84: mol_type = other DNA
tttttttaagcagtggtatcaacgcagagtacnnaaggcctanngattcgcanntttttttttttttttttttttttttttttt

SEQ ID NO: 2508 - DNA, 84 bp, synthetic construct
  source 1..84: mol_type = other DNA
tttttttaagcagtggtatcaacgcagagtacnnaaggcctanncgatggaanntttttttttttttttttttttttttttttt

SEQ ID NO: 2509 - DNA, 84 bp, synthetic construct
  source 1..84: mol_type = other DNA
tttttttaagcagtggtatcaacgcagagtacnnaaggcctannagcaagganntttttttttttttttttttttttttttttt

SEQ ID NO: 2510 - DNA, 84 bp, synthetic construct
  source 1..84: mol_type = other DNA
tttttttaagcagtggtatcaacgcagagtacnnaaggcctanncgtagcaanntttttttttttttttttttttttttttttt

SEQ ID NO: 2511 - DNA, 84 bp, synthetic construct
  source 1..84: mol_type = other DNA
tttttttaagcagtggtatcaacgcagagtacnnaaggcctanntggcagtanntttttttttttttttttttttttttttttt

SEQ ID NO: 2512 - DNA, 84 bp, synthetic construct
  source 1..84: mol_type = other DNA
tttttttaagcagtggtatcaacgcagagtacnnaaggcctanncggtagttnntttttttttttttttttttttttttttttt

SEQ ID NO: 2513 - DNA, 84 bp, synthetic construct
  source 1..84: mol_type = other DNA
tttttttaagcagtggtatcaacgcagagtacnnaaggcctanntgacttcgnntttttttttttttttttttttttttttttt

SEQ ID NO: 2514 - DNA, 84 bp, synthetic construct
  source 1..84: mol_type = other DNA
tttttttaagcagtggtatcaacgcagagtacnnaaggcctanngagtgcaanntttttttttttttttttttttttttttttt

SEQ ID NO: 2515 - DNA, 84 bp, synthetic construct
  source 1..84: mol_type = other DNA
tttttttaagcagtggtatcaacgcagagtacnnaaggcctannacggtaacnntttttttttttttttttttttttttttttt

SEQ ID NO: 2516 - DNA, 84 bp, synthetic construct
  source 1..84: mol_type = other DNA
tttttttaagcagtggtatcaacgcagagtacnnaaggcctannaagtggtgnntttttttttttttttttttttttttttttt

SEQ ID NO: 2517 - DNA, 84 bp, synthetic construct
  source 1..84: mol_type = other DNA
tttttttaagcagtggtatcaacgcagagtacnnaaggcctannggagacaanntttttttttttttttttttttttttttttt

SEQ ID NO: 2518 - DNA, 84 bp, synthetic construct
  source 1..84: mol_type = other DNA
tttttttaagcagtggtatcaacgcagagtacnnaaggcctanntcaaggacnntttttttttttttttttttttttttttttt

SEQ ID NO: 2519 - DNA, 84 bp, synthetic construct
  source 1..84: mol_type = other DNA
tttttttaagcagtggtatcaacgcagagtacnnaaggcctannaagagagcnntttttttttttttttttttttttttttttt

SEQ ID NO: 2520 - DNA, 84 bp, synthetic construct
  source 1..84: mol_type = other DNA
tttttttaagcagtggtatcaacgcagagtacnnaaggcctanncgagagatnntttttttttttttttttttttttttttttt

SEQ ID NO: 2521 - DNA, 84 bp, synthetic construct
  source 1..84: mol_type = other DNA
tttttttaagcagtggtatcaacgcagagtacnnaaggcctannacagatggnntttttttttttttttttttttttttttttt

SEQ ID NO: 2522 - DNA, 84 bp, synthetic construct
  source 1..84: mol_type = other DNA
tttttttaagcagtggtatcaacgcagagtacnnaaggcctannaggagtcanntttttttttttttttttttttttttttttt

SEQ ID NO: 2523 - DNA, 84 bp, synthetic construct
  source 1..84: mol_type = other DNA
tttttttaagcagtggtatcaacgcagagtacnnaaggcctanncgtgttacnntttttttttttttttttttttttttttttt

SEQ ID NO: 2524 - DNA, 84 bp, synthetic construct
  source 1..84: mol_type = other DNA
tttttttaagcagtggtatcaacgcagagtacnnaaggcctanntagtgtgcnntttttttttttttttttttttttttttttt

SEQ ID NO: 2525 - DNA, 84 bp, synthetic construct
  source 1..84: mol_type = other DNA
tttttttaagcagtggtatcaacgcagagtacnnaaggcctannctcatgacnntttttttttttttttttttttttttttttt

SEQ ID NO: 2526 - DNA, 84 bp, synthetic construct
  source 1..84: mol_type = other DNA
tttttttaagcagtggtatcaacgcagagtacnnaaggcctanngtatccagnntttttttttttttttttttttttttttttt

SEQ ID NO: 2527 - DNA, 84 bp, synthetic construct
  source 1..84: mol_type = other DNA
tttttttaagcagtggtatcaacgcagagtacnnaaggcctannacgcctatnntttttttttttttttttttttttttttttt

SEQ ID NO: 2528 - DNA, 84 bp, synthetic construct
  source 1..84: mol_type = other DNA
tttttttaagcagtggtatcaacgcagagtacnnaaggcctannaacgacctnntttttttttttttttttttttttttttttt

SEQ ID NO: 2529 - DNA, 84 bp, synthetic construct
  source 1..84: mol_type = other DNA
tttttttaagcagtggtatcaacgcagagtacnnaaggcctannatcaggctnntttttttttttttttttttttttttttttt

SEQ ID NO: 2530 - DNA, 84 bp, synthetic construct
  source 1..84: mol_type = other DNA
tttttttaagcagtggtatcaacgcagagtacnnaaggcctanncaagttcgnntttttttttttttttttttttttttttttt

SEQ ID NO: 2531 - DNA, 84 bp, synthetic construct
  source 1..84: mol_type = other DNA
tttttttaagcagtggtatcaacgcagagtacnnaaggcctanntagccaganntttttttttttttttttttttttttttttt

SEQ ID NO: 2532 - DNA, 84 bp, synthetic construct
  source 1..84: mol_type = other DNA
tttttttaagcagtggtatcaacgcagagtacnnaaggcctanncaatcacgnntttttttttttttttttttttttttttttt

SEQ ID NO: 2533 - DNA, 84 bp, synthetic construct
  source 1..84: mol_type = other DNA
tttttttaagcagtggtatcaacgcagagtacnnaaggcctanngcaacaagnntttttttttttttttttttttttttttttt

SEQ ID NO: 2534 - DNA, 84 bp, synthetic construct
  source 1..84: mol_type = other DNA
tttttttaagcagtggtatcaacgcagagtacnnaaggcctanncacgacaanntttttttttttttttttttttttttttttt

SEQ ID NO: 2535 - DNA, 84 bp, synthetic construct
  source 1..84: mol_type = other DNA
tttttttaagcagtggtatcaacgcagagtacnnaaggcctanntacggaganntttttttttttttttttttttttttttttt

SEQ ID NO: 2536 - DNA, 84 bp, synthetic construct
  source 1..84: mol_type = other DNA
tttttttaagcagtggtatcaacgcagagtacnnaaggcctanncgacaaganntttttttttttttttttttttttttttttt

SEQ ID NO: 2537 - DNA, 84 bp, synthetic construct
  source 1..84: mol_type = other DNA
tttttttaagcagtggtatcaacgcagagtacnnaaggcctanncgaagtganntttttttttttttttttttttttttttttt

SEQ ID NO: 2538 - DNA, 84 bp, synthetic construct
  source 1..84: mol_type = other DNA
tttttttaagcagtggtatcaacgcagagtacnnaaggcctannagctggtanntttttttttttttttttttttttttttttt

SEQ ID NO: 2539 - DNA, 84 bp, synthetic construct
  source 1..84: mol_type = other DNA
tttttttaagcagtggtatcaacgcagagtacnnaaggcctannaactaggcnntttttttttttttttttttttttttttttt

SEQ ID NO: 2540 - DNA, 84 bp, synthetic construct
  source 1..84: mol_type = other DNA
tttttttaagcagtggtatcaacgcagagtacnnaaggcctanncagcaagtnntttttttttttttttttttttttttttttt

SEQ ID NO: 2541 - DNA, 84 bp, synthetic construct
  source 1..84: mol_type = other DNA
tttttttaagcagtggtatcaacgcagagtacnnaaggcctannacgaggtanntttttttttttttttttttttttttttttt

SEQ ID NO: 2542 - DNA, 84 bp, synthetic construct
  source 1..84: mol_type = other DNA
tttttttaagcagtggtatcaacgcagagtacnnaaggcctanncatcttccnntttttttttttttttttttttttttttttt

SEQ ID NO: 2543 - DNA, 84 bp, synthetic construct
  source 1..84: mol_type = other DNA
tttttttaagcagtggtatcaacgcagagtacnnaaggcctanncctgaatcnntttttttttttttttttttttttttttttt

SEQ ID NO: 2544 - DNA, 84 bp, synthetic construct
  source 1..84: mol_type = other DNA
tttttttaagcagtggtatcaacgcagagtacnnaaggcctanntgcagactnntttttttttttttttttttttttttttttt

SEQ ID NO: 2545 - DNA, 84 bp, synthetic construct
  source 1..84: mol_type = other DNA
tttttttaagcagtggtatcaacgcagagtacnnaaggcctannagatgtggnntttttttttttttttttttttttttttttt

SEQ ID NO: 2546 - DNA, 84 bp, synthetic construct
  source 1..84: mol_type = other DNA
tttttttaagcagtggtatcaacgcagagtacnnaaggcctannagttcgacnntttttttttttttttttttttttttttttt

SEQ ID NO: 2547 - DNA, 84 bp, synthetic construct
  source 1..84: mol_type = other DNA
tttttttaagcagtggtatcaacgcagagtacnnaaggcctannacaacctcnntttttttttttttttttttttttttttttt

SEQ ID NO: 2548 - DNA, 84 bp, synthetic construct
  source 1..84: mol_type = other DNA
tttttttaagcagtggtatcaacgcagagtacnnaaggcctanncatggtagnntttttttttttttttttttttttttttttt

SEQ ID NO: 2549 - DNA, 84 bp, synthetic construct
  source 1..84: mol_type = other DNA
tttttttaagcagtggtatcaacgcagagtacnnaaggcctanncgtatctcnntttttttttttttttttttttttttttttt

SEQ ID NO: 2550 - DNA, 84 bp, synthetic construct
  source 1..84: mol_type = other DNA
tttttttaagcagtggtatcaacgcagagtacnnaaggcctanncctagttcnntttttttttttttttttttttttttttttt

SEQ ID NO: 2551 - DNA, 84 bp, synthetic construct
  source 1..84: mol_type = other DNA
tttttttaagcagtggtatcaacgcagagtacnnaaggcctanncaagagtcnntttttttttttttttttttttttttttttt

SEQ ID NO: 2552 - DNA, 84 bp, synthetic construct
  source 1..84: mol_type = other DNA
tttttttaagcagtggtatcaacgcagagtacnncgtaatcgnnaatcggcanntttttttttttttttttttttttttttttt

SEQ ID NO: 2553 - DNA, 84 bp, synthetic construct
  source 1..84: mol_type = other DNA
tttttttaagcagtggtatcaacgcagagtacnncgtaatcgnntacggcatnntttttttttttttttttttttttttttttt

SEQ ID NO: 2554 - DNA, 84 bp, synthetic construct
  source 1..84: mol_type = other DNA
tttttttaagcagtggtatcaacgcagagtacnncgtaatcgnnttggatcgnntttttttttttttttttttttttttttttt

SEQ ID NO: 2555 - DNA, 84 bp, synthetic construct
  source 1..84: mol_type = other DNA
tttttttaagcagtggtatcaacgcagagtacnncgtaatcgnntggaacganntttttttttttttttttttttttttttttt

SEQ ID NO: 2556 - DNA, 84 bp, synthetic construct
  source 1..84: mol_type = other DNA
tttttttaagcagtggtatcaacgcagagtacnncgtaatcgnnggcaatcanntttttttttttttttttttttttttttttt

SEQ ID NO: 2557 - DNA, 84 bp, synthetic construct
  source 1..84: mol_type = other DNA
tttttttaagcagtggtatcaacgcagagtacnncgtaatcgnngaatccganntttttttttttttttttttttttttttttt

SEQ ID NO: 2558 - DNA, 84 bp, synthetic construct
  source 1..84: mol_type = other DNA
tttttttaagcagtggtatcaacgcagagtacnncgtaatcgnnttacggtgnntttttttttttttttttttttttttttttt

SEQ ID NO: 2559 - DNA, 84 bp, synthetic construct
  source 1..84: mol_type = other DNA
tttttttaagcagtggtatcaacgcagagtacnncgtaatcgnncatatcggnntttttttttttttttttttttttttttttt

SEQ ID NO: 2560 - DNA, 84 bp, synthetic construct
  source 1..84: mol_type = other DNA
tttttttaagcagtggtatcaacgcagagtacnncgtaatcgnncttcggtanntttttttttttttttttttttttttttttt

SEQ ID NO: 2561 - DNA, 84 bp, synthetic construct
  source 1..84: mol_type = other DNA
tttttttaagcagtggtatcaacgcagagtacnncgtaatcgnntcctaacgnntttttttttttttttttttttttttttttt

SEQ ID NO: 2562 - DNA, 84 bp, synthetic construct
  source 1..84: mol_type = other DNA
tttttttaagcagtggtatcaacgcagagtacnncgtaatcgnngtaagccanntttttttttttttttttttttttttttttt

SEQ ID NO: 2563 - DNA, 84 bp, synthetic construct
  source 1..84: mol_type = other DNA
tttttttaagcagtggtatcaacgcagagtacnncgtaatcgnntaaggtggnntttttttttttttttttttttttttttttt

SEQ ID NO: 2564 - DNA, 84 bp, synthetic construct
  source 1..84: mol_type = other DNA
tttttttaagcagtggtatcaacgcagagtacnncgtaatcgnnggtaagctnntttttttttttttttttttttttttttttt

SEQ ID NO: 2565 - DNA, 84 bp, synthetic construct
  source 1..84: mol_type = other DNA
tttttttaagcagtggtatcaacgcagagtacnncgtaatcgnntgtgtcganntttttttttttttttttttttttttttttt

SEQ ID NO: 2566 - DNA, 84 bp, synthetic construct
  source 1..84: mol_type = other DNA
tttttttaagcagtggtatcaacgcagagtacnncgtaatcgnngagcatganntttttttttttttttttttttttttttttt

SEQ ID NO: 2567 - DNA, 84 bp, synthetic construct
  source 1..84: mol_type = other DNA
tttttttaagcagtggtatcaacgcagagtacnncgtaatcgnntcgaagtcnntttttttttttttttttttttttttttttt

SEQ ID NO: 2568 - DNA, 84 bp, synthetic construct
  source 1..84: mol_type = other DNA
tttttttaagcagtggtatcaacgcagagtacnncgtaatcgnnggtgaacanntttttttttttttttttttttttttttttt

SEQ ID NO: 2569 - DNA, 84 bp, synthetic construct
  source 1..84: mol_type = other DNA
tttttttaagcagtggtatcaacgcagagtacnncgtaatcgnnacatgcacnntttttttttttttttttttttttttttttt

SEQ ID NO: 2570 - DNA, 84 bp, synthetic construct
  source 1..84: mol_type = other DNA
tttttttaagcagtggtatcaacgcagagtacnncgtaatcgnnccaacagtnntttttttttttttttttttttttttttttt

SEQ ID NO: 2571 - DNA, 84 bp, synthetic construct
  source 1..84: mol_type = other DNA
tttttttaagcagtggtatcaacgcagagtacnncgtaatcgnnagaacagcnntttttttttttttttttttttttttttttt

SEQ ID NO: 2572 - DNA, 84 bp, synthetic construct
  source 1..84: mol_type = other DNA
tttttttaagcagtggtatcaacgcagagtacnncgtaatcgnngaacacgtnntttttttttttttttttttttttttttttt

SEQ ID NO: 2573 - DNA, 84 bp, synthetic construct
  source 1..84: mol_type = other DNA
tttttttaagcagtggtatcaacgcagagtacnncgtaatcgnnggtcttcanntttttttttttttttttttttttttttttt

SEQ ID NO: 2574 - DNA, 84 bp, synthetic construct
  source 1..84: mol_type = other DNA
tttttttaagcagtggtatcaacgcagagtacnncgtaatcgnnaggttcagnntttttttttttttttttttttttttttttt

SEQ ID NO: 2575 - DNA, 84 bp, synthetic construct
  source 1..84: mol_type = other DNA
tttttttaagcagtggtatcaacgcagagtacnncgtaatcgnnctagagcanntttttttttttttttttttttttttttttt

SEQ ID NO: 2576 - DNA, 84 bp, synthetic construct
  source 1..84: mol_type = other DNA
tttttttaagcagtggtatcaacgcagagtacnncgtaatcgnncttctagcnntttttttttttttttttttttttttttttt

SEQ ID NO: 2577 - DNA, 84 bp, synthetic construct
  source 1..84: mol_type = other DNA
tttttttaagcagtggtatcaacgcagagtacnncgtaatcgnngagtaacgnntttttttttttttttttttttttttttttt

SEQ ID NO: 2578 - DNA, 84 bp, synthetic construct
  source 1..84: mol_type = other DNA
tttttttaagcagtggtatcaacgcagagtacnncgtaatcgnnctaagaggnntttttttttttttttttttttttttttttt

SEQ ID NO: 2579 - DNA, 84 bp, synthetic construct
  source 1..84: mol_type = other DNA
tttttttaagcagtggtatcaacgcagagtacnncgtaatcgnnacgtgtagnntttttttttttttttttttttttttttttt

SEQ ID NO: 2580 - DNA, 84 bp, synthetic construct
  source 1..84: mol_type = other DNA
tttttttaagcagtggtatcaacgcagagtacnncgtaatcgnnactacaggnntttttttttttttttttttttttttttttt

SEQ ID NO: 2581 - DNA, 84 bp, synthetic construct
  source 1..84: mol_type = other DNA
tttttttaagcagtggtatcaacgcagagtacnncgtaatcgnntacaggtcnntttttttttttttttttttttttttttttt

SEQ ID NO: 2582 - DNA, 84 bp, synthetic construct
  source 1..84: mol_type = other DNA
tttttttaagcagtggtatcaacgcagagtacnncgtaatcgnnctcacatgnntttttttttttttttttttttttttttttt

SEQ ID NO: 2583 - DNA, 84 bp, synthetic construct
  source 1..84: mol_type = other DNA
tttttttaagcagtggtatcaacgcagagtacnncgtaatcgnnactaggagnntttttttttttttttttttttttttttttt

SEQ ID NO: 2584 - DNA, 84 bp, synthetic construct
  source 1..84: mol_type = other DNA
tttttttaagcagtggtatcaacgcagagtacnncgtaatcgnnccatagganntttttttttttttttttttttttttttttt

SEQ ID NO: 2585 - DNA, 84 bp, synthetic construct
  source 1..84: mol_type = other DNA
tttttttaagcagtggtatcaacgcagagtacnncgtaatcgnnggagaatcnntttttttttttttttttttttttttttttt

SEQ ID NO: 2586 - DNA, 84 bp, synthetic construct
  source 1..84: mol_type = other DNA
tttttttaagcagtggtatcaacgcagagtacnncgtaatcgnngccaagaanntttttttttttttttttttttttttttttt

SEQ ID NO: 2587 - DNA, 84 bp, synthetic construct
  source 1..84: mol_type = other DNA
tttttttaagcagtggtatcaacgcagagtacnncgtaatcgnnaaggcaagnntttttttttttttttttttttttttttttt

SEQ ID NO: 2588 - DNA, 84 bp, synthetic construct
  source 1..84: mol_type = other DNA
tttttttaagcagtggtatcaacgcagagtacnncgtaatcgnnaatgtcgcnntttttttttttttttttttttttttttttt

SEQ ID NO: 2589 - DNA, 84 bp, synthetic construct
  source 1..84: mol_type = other DNA
tttttttaagcagtggtatcaacgcagagtacnncgtaatcgnnatggaaccnntttttttttttttttttttttttttttttt

SEQ ID NO: 2590 - DNA, 84 bp, synthetic construct
  source 1..84: mol_type = other DNA
tttttttaagcagtggtatcaacgcagagtacnncgtaatcgnnagaggcatnntttttttttttttttttttttttttttttt

SEQ ID NO: 2591 - DNA, 84 bp, synthetic construct
  source 1..84: mol_type = other DNA
tttttttaagcagtggtatcaacgcagagtacnncgtaatcgnntgcatagcnntttttttttttttttttttttttttttttt

SEQ ID NO: 2592 - DNA, 84 bp, synthetic construct
  source 1..84: mol_type = other DNA
tttttttaagcagtggtatcaacgcagagtacnncgtaatcgnnctaacgganntttttttttttttttttttttttttttttt

SEQ ID NO: 2593 - DNA, 84 bp, synthetic construct
  source 1..84: mol_type = other DNA
tttttttaagcagtggtatcaacgcagagtacnncgtaatcgnntatcgaggnntttttttttttttttttttttttttttttt

SEQ ID NO: 2594 - DNA, 84 bp, synthetic construct
  source 1..84: mol_type = other DNA
tttttttaagcagtggtatcaacgcagagtacnncgtaatcgnncatagcctnntttttttttttttttttttttttttttttt

SEQ ID NO: 2595 - DNA, 84 bp, synthetic construct
  source 1..84: mol_type = other DNA
tttttttaagcagtggtatcaacgcagagtacnncgtaatcgnnatcgagacnntttttttttttttttttttttttttttttt

SEQ ID NO: 2596 - DNA, 84 bp, synthetic construct
  source 1..84: mol_type = other DNA
tttttttaagcagtggtatcaacgcagagtacnncgtaatcgnnggaagagtnntttttttttttttttttttttttttttttt

SEQ ID NO: 2597 - DNA, 84 bp, synthetic construct
  source 1..84: mol_type = other DNA
tttttttaagcagtggtatcaacgcagagtacnncgtaatcgnnccaagtagnntttttttttttttttttttttttttttttt

SEQ ID NO: 2598 - DNA, 84 bp, synthetic construct
  source 1..84: mol_type = other DNA
tttttttaagcagtggtatcaacgcagagtacnncgtaatcgnnctgaacagnntttttttttttttttttttttttttttttt

SEQ ID NO: 2599 - DNA, 84 bp, synthetic construct
  source 1..84: mol_type = other DNA
tttttttaagcagtggtatcaacgcagagtacnncgtaatcgnngtaggttcnntttttttttttttttttttttttttttttt

SEQ ID NO: 2600 - DNA, 84 bp, synthetic construct
  source 1..84: mol_type = other DNA
tttttttaagcagtggtatcaacgcagagtacnncgtaatcgnngtatggacnntttttttttttttttttttttttttttttt

SEQ ID NO: 2601 - DNA, 84 bp, synthetic construct
  source 1..84: mol_type = other DNA
tttttttaagcagtggtatcaacgcagagtacnncgtaatcgnntcgcaacanntttttttttttttttttttttttttttttt

SEQ ID NO: 2602 - DNA, 84 bp, synthetic construct
  source 1..84: mol_type = other DNA
tttttttaagcagtggtatcaacgcagagtacnncgtaatcgnnccgctaatnntttttttttttttttttttttttttttttt

SEQ ID NO: 2603 - DNA, 84 bp, synthetic construct
  source 1..84: mol_type = other DNA
tttttttaagcagtggtatcaacgcagagtacnncgtaatcgnngattcgcanntttttttttttttttttttttttttttttt

SEQ ID NO: 2604 - DNA, 84 bp, synthetic construct
  source 1..84: mol_type = other DNA
tttttttaagcagtggtatcaacgcagagtacnncgtaatcgnncgatggaanntttttttttttttttttttttttttttttt

SEQ ID NO: 2605 - DNA, 84 bp, synthetic construct
  source 1..84: mol_type = other DNA
tttttttaagcagtggtatcaacgcagagtacnncgtaatcgnnagcaagganntttttttttttttttttttttttttttttt

SEQ ID NO: 2606 - DNA, 84 bp, synthetic construct
  source 1..84: mol_type = other DNA
tttttttaagcagtggtatcaacgcagagtacnncgtaatcgnncgtagcaanntttttttttttttttttttttttttttttt

SEQ ID NO: 2607 - DNA, 84 bp, synthetic construct
  source 1..84: mol_type = other DNA
tttttttaagcagtggtatcaacgcagagtacnncgtaatcgnntggcagtanntttttttttttttttttttttttttttttt

SEQ ID NO: 2608 - DNA, 84 bp, synthetic construct
  source 1..84: mol_type = other DNA
tttttttaagcagtggtatcaacgcagagtacnncgtaatcgnncggtagttnntttttttttttttttttttttttttttttt

SEQ ID NO: 2609 - DNA, 84 bp, synthetic construct
  source 1..84: mol_type = other DNA
tttttttaagcagtggtatcaacgcagagtacnncgtaatcgnntgacttcgnntttttttttttttttttttttttttttttt

SEQ ID NO: 2610 - DNA, 84 bp, synthetic construct
  source 1..84: mol_type = other DNA
tttttttaagcagtggtatcaacgcagagtacnncgtaatcgnngagtgcaanntttttttttttttttttttttttttttttt

SEQ ID NO: 2611 - DNA, 84 bp, synthetic construct
  source 1..84: mol_type = other DNA
tttttttaagcagtggtatcaacgcagagtacnncgtaatcgnnacggtaacnntttttttttttttttttttttttttttttt

SEQ ID NO: 2612 - DNA, 84 bp, synthetic construct
  source 1..84: mol_type = other DNA
tttttttaagcagtggtatcaacgcagagtacnncgtaatcgnnaagtggtgnntttttttttttttttttttttttttttttt

SEQ ID NO: 2613 - DNA, 84 bp, synthetic construct
  source 1..84: mol_type = other DNA
tttttttaagcagtggtatcaacgcagagtacnncgtaatcgnnggagacaanntttttttttttttttttttttttttttttt

SEQ ID NO: 2614 - DNA, 84 bp, synthetic construct
  source 1..84: mol_type = other DNA
tttttttaagcagtggtatcaacgcagagtacnncgtaatcgnntcaaggacnntttttttttttttttttttttttttttttt

SEQ ID NO: 2615 - DNA, 84 bp, synthetic construct
  source 1..84: mol_type = other DNA
tttttttaagcagtggtatcaacgcagagtacnncgtaatcgnnaagagagcnntttttttttttttttttttttttttttttt

SEQ ID NO: 2616 - DNA, 84 bp, synthetic construct
  source 1..84: mol_type = other DNA
tttttttaagcagtggtatcaacgcagagtacnncgtaatcgnncgagagatnntttttttttttttttttttttttttttttt

SEQ ID NO: 2617 - DNA, 84 bp, synthetic construct
  source 1..84: mol_type = other DNA
tttttttaagcagtggtatcaacgcagagtacnncgtaatcgnnacagatggnntttttttttttttttttttttttttttttt

SEQ ID NO: 2618 - DNA, 84 bp, synthetic construct
  source 1..84: mol_type = other DNA
tttttttaagcagtggtatcaacgcagagtacnncgtaatcgnnaggagtcanntttttttttttttttttttttttttttttt

SEQ ID NO: 2619 - DNA, 84 bp, synthetic construct
  source 1..84: mol_type = other DNA
tttttttaagcagtggtatcaacgcagagtacnncgtaatcgnncgtgttacnntttttttttttttttttttttttttttttt

SEQ ID NO: 2620 - DNA, 84 bp, synthetic construct
  source 1..84: mol_type = other DNA
tttttttaagcagtggtatcaacgcagagtacnncgtaatcgnntagtgtgcnntttttttttttttttttttttttttttttt

SEQ ID NO: 2621 - DNA, 84 bp, synthetic construct
  source 1..84: mol_type = other DNA
tttttttaagcagtggtatcaacgcagagtacnncgtaatcgnnctcatgacnntttttttttttttttttttttttttttttt

SEQ ID NO: 2622 - DNA, 84 bp, synthetic construct
  source 1..84: mol_type = other DNA
tttttttaagcagtggtatcaacgcagagtacnncgtaatcgnngtatccagnntttttttttttttttttttttttttttttt

SEQ ID NO: 2623 - DNA, 84 bp, synthetic construct
  source 1..84: mol_type = other DNA
tttttttaagcagtggtatcaacgcagagtacnncgtaatcgnnacgcctatnntttttttttttttttttttttttttttttt

SEQ ID NO: 2624 - DNA, 84 bp, synthetic construct
  source 1..84: mol_type = other DNA
tttttttaagcagtggtatcaacgcagagtacnncgtaatcgnnaacgacctnntttttttttttttttttttttttttttttt

SEQ ID NO: 2625 - DNA, 84 bp, synthetic construct
  source 1..84: mol_type = other DNA
tttttttaagcagtggtatcaacgcagagtacnncgtaatcgnnatcaggctnntttttttttttttttttttttttttttttt

SEQ ID NO: 2626 - DNA, 84 bp, synthetic construct
  source 1..84: mol_type = other DNA
tttttttaagcagtggtatcaacgcagagtacnncgtaatcgnncaagttcgnntttttttttttttttttttttttttttttt

SEQ ID NO: 2627 - DNA, 84 bp, synthetic construct
  source 1..84: mol_type = other DNA
tttttttaagcagtggtatcaacgcagagtacnncgtaatcgnntagccaganntttttttttttttttttttttttttttttt

SEQ ID NO: 2628 - DNA, 84 bp, synthetic construct
  source 1..84: mol_type = other DNA
tttttttaagcagtggtatcaacgcagagtacnncgtaatcgnncaatcacgnntttttttttttttttttttttttttttttt

SEQ ID NO: 2629 - DNA, 84 bp, synthetic construct
  source 1..84: mol_type = other DNA
tttttttaagcagtggtatcaacgcagagtacnncgtaatcgnngcaacaagnntttttttttttttttttttttttttttttt

SEQ ID NO: 2630 - DNA, 84 bp, synthetic construct
  source 1..84: mol_type = other DNA
tttttttaagcagtggtatcaacgcagagtacnncgtaatcgnncacgacaanntttttttttttttttttttttttttttttt

SEQ ID NO: 2631 - DNA, 84 bp, synthetic construct
  source 1..84: mol_type = other DNA
tttttttaagcagtggtatcaacgcagagtacnncgtaatcgnntacggaganntttttttttttttttttttttttttttttt

SEQ ID NO: 2632 - DNA, 84 bp, synthetic construct
  source 1..84: mol_type = other DNA
tttttttaagcagtggtatcaacgcagagtacnncgtaatcgnncgacaaganntttttttttttttttttttttttttttttt

SEQ ID NO: 2633 - DNA, 84 bp, synthetic construct
  source 1..84: mol_type = other DNA
tttttttaagcagtggtatcaacgcagagtacnncgtaatcgnncgaagtganntttttttttttttttttttttttttttttt

SEQ ID NO: 2634 - DNA, 84 bp, synthetic construct
  source 1..84: mol_type = other DNA
tttttttaagcagtggtatcaacgcagagtacnncgtaatcgnnagctggtanntttttttttttttttttttttttttttttt

SEQ ID NO: 2635 - DNA, 84 bp, synthetic construct
  source 1..84: mol_type = other DNA
tttttttaagcagtggtatcaacgcagagtacnncgtaatcgnnaactaggcnntttttttttttttttttttttttttttttt

SEQ ID NO: 2636 - DNA, 84 bp, synthetic construct
  source 1..84: mol_type = other DNA
tttttttaagcagtggtatcaacgcagagtacnncgtaatcgnncagcaagtnntttttttttttttttttttttttttttttt

SEQ ID NO: 2637 - DNA, 84 bp, synthetic construct
  source 1..84: mol_type = other DNA
tttttttaagcagtggtatcaacgcagagtacnncgtaatcgnnacgaggtanntttttttttttttttttttttttttttttt

SEQ ID NO: 2638 - DNA, 84 bp, synthetic construct
  source 1..84: mol_type = other DNA
tttttttaagcagtggtatcaacgcagagtacnncgtaatcgnncatcttccnntttttttttttttttttttttttttttttt

SEQ ID NO: 2639 - DNA, 84 bp, synthetic construct
  source 1..84: mol_type = other DNA
tttttttaagcagtggtatcaacgcagagtacnncgtaatcgnncctgaatcnntttttttttttttttttttttttttttttt

SEQ ID NO: 2640 - DNA, 84 bp, synthetic construct
  source 1..84: mol_type = other DNA
tttttttaagcagtggtatcaacgcagagtacnncgtaatcgnntgcagactnntttttttttttttttttttttttttttttt

SEQ ID NO: 2641 - DNA, 84 bp, synthetic construct
  source 1..84: mol_type = other DNA
tttttttaagcagtggtatcaacgcagagtacnncgtaatcgnnagatgtggnntttttttttttttttttttttttttttttt

SEQ ID NO: 2642 - DNA, 84 bp, synthetic construct
  source 1..84: mol_type = other DNA
tttttttaagcagtggtatcaacgcagagtacnncgtaatcgnnagttcgacnntttttttttttttttttttttttttttttt

SEQ ID NO: 2643 - DNA, 84 bp, synthetic construct
  source 1..84: mol_type = other DNA
tttttttaagcagtggtatcaacgcagagtacnncgtaatcgnnacaacctcnntttttttttttttttttttttttttttttt

SEQ ID NO: 2644 - DNA, 84 bp, synthetic construct
  source 1..84: mol_type = other DNA
tttttttaagcagtggtatcaacgcagagtacnncgtaatcgnncatggtagnntttttttttttttttttttttttttttttt

SEQ ID NO: 2645 - DNA, 84 bp, synthetic construct
  source 1..84: mol_type = other DNA
tttttttaagcagtggtatcaacgcagagtacnncgtaatcgnncgtatctcnntttttttttttttttttttttttttttttt

SEQ ID NO: 2646 - DNA, 84 bp, synthetic construct
  source 1..84: mol_type = other DNA
tttttttaagcagtggtatcaacgcagagtacnncgtaatcgnncctagttcnntttttttttttttttttttttttttttttt

SEQ ID NO: 2647 - DNA, 84 bp, synthetic construct
  source 1..84: mol_type = other DNA
tttttttaagcagtggtatcaacgcagagtacnncgtaatcgnncaagagtcnntttttttttttttttttttttttttttttt

SEQ ID NO: 2648 - DNA, 84 bp, synthetic construct
  source 1..84: mol_type = other DNA
tttttttaagcagtggtatcaacgcagagtacnntgagaaggnnaatcggcanntttttttttttttttttttttttttttttt

SEQ ID NO: 2649 - DNA, 84 bp, synthetic construct
  source 1..84: mol_type = other DNA
tttttttaagcagtggtatcaacgcagagtacnntgagaaggnntacggcatnntttttttttttttttttttttttttttttt

SEQ ID NO: 2650 - DNA, 84 bp, synthetic construct
  source 1..84: mol_type = other DNA
tttttttaagcagtggtatcaacgcagagtacnntgagaaggnnttggatcgnntttttttttttttttttttttttttttttt

SEQ ID NO: 2651 - DNA, 84 bp, synthetic construct
  source 1..84: mol_type = other DNA
tttttttaagcagtggtatcaacgcagagtacnntgagaaggnntggaacganntttttttttttttttttttttttttttttt

SEQ ID NO: 2652 - DNA, 84 bp, synthetic construct
  source 1..84: mol_type = other DNA
tttttttaagcagtggtatcaacgcagagtacnntgagaaggnnggcaatcanntttttttttttttttttttttttttttttt

SEQ ID NO: 2653 - DNA, 84 bp, synthetic construct
  source 1..84: mol_type = other DNA
tttttttaagcagtggtatcaacgcagagtacnntgagaaggnngaatccganntttttttttttttttttttttttttttttt

SEQ ID NO: 2654 - DNA, 84 bp, synthetic construct
  source 1..84: mol_type = other DNA
tttttttaagcagtggtatcaacgcagagtacnntgagaaggnnttacggtgnntttttttttttttttttttttttttttttt

SEQ ID NO: 2655 - DNA, 84 bp, synthetic construct
  source 1..84: mol_type = other DNA
tttttttaagcagtggtatcaacgcagagtacnntgagaaggnncatatcggnntttttttttttttttttttttttttttttt

SEQ ID NO: 2656 - DNA, 84 bp, synthetic construct
  source 1..84: mol_type = other DNA
tttttttaagcagtggtatcaacgcagagtacnntgagaaggnncttcggtanntttttttttttttttttttttttttttttt

SEQ ID NO: 2657 - DNA, 84 bp, synthetic construct
  source 1..84: mol_type = other DNA
tttttttaagcagtggtatcaacgcagagtacnntgagaaggnntcctaacgnntttttttttttttttttttttttttttttt

SEQ ID NO: 2658 - DNA, 84 bp, synthetic construct
  source 1..84: mol_type = other DNA
tttttttaagcagtggtatcaacgcagagtacnntgagaaggnngtaagccanntttttttttttttttttttttttttttttt

SEQ ID NO: 2659 - DNA, 84 bp, synthetic construct
  source 1..84: mol_type = other DNA
tttttttaagcagtggtatcaacgcagagtacnntgagaaggnntaaggtggnntttttttttttttttttttttttttttttt

SEQ ID NO: 2660 - DNA, 84 bp, synthetic construct
  source 1..84: mol_type = other DNA
tttttttaagcagtggtatcaacgcagagtacnntgagaaggnnggtaagctnntttttttttttttttttttttttttttttt

SEQ ID NO: 2661 - DNA, 84 bp, synthetic construct
  source 1..84: mol_type = other DNA
tttttttaagcagtggtatcaacgcagagtacnntgagaaggnntgtgtcganntttttttttttttttttttttttttttttt

SEQ ID NO: 2662 - DNA, 84 bp, synthetic construct
  source 1..84: mol_type = other DNA
tttttttaagcagtggtatcaacgcagagtacnntgagaaggnngagcatganntttttttttttttttttttttttttttttt

SEQ ID NO: 2663 - DNA, 84 bp, synthetic construct
  source 1..84: mol_type = other DNA
tttttttaagcagtggtatcaacgcagagtacnntgagaaggnntcgaagtcnntttttttttttttttttttttttttttttt

SEQ ID NO: 2664 - DNA, 84 bp, synthetic construct
  source 1..84: mol_type = other DNA
tttttttaagcagtggtatcaacgcagagtacnntgagaaggnnggtgaacanntttttttttttttttttttttttttttttt

SEQ ID NO: 2665 - DNA, 84 bp, synthetic construct
  source 1..84: mol_type = other DNA
tttttttaagcagtggtatcaacgcagagtacnntgagaaggnnacatgcacnntttttttttttttttttttttttttttttt

SEQ ID NO: 2666 - DNA, 84 bp, synthetic construct
  source 1..84: mol_type = other DNA
tttttttaagcagtggtatcaacgcagagtacnntgagaaggnnccaacagtnntttttttttttttttttttttttttttttt

SEQ ID NO: 2667 - DNA, 84 bp, synthetic construct
  source 1..84: mol_type = other DNA
tttttttaagcagtggtatcaacgcagagtacnntgagaaggnnagaacagcnntttttttttttttttttttttttttttttt

SEQ ID NO: 2668 - DNA, 84 bp, synthetic construct
  source 1..84: mol_type = other DNA
tttttttaagcagtggtatcaacgcagagtacnntgagaaggnngaacacgtnntttttttttttttttttttttttttttttt

SEQ ID NO: 2669 - DNA, 84 bp, synthetic construct
  source 1..84: mol_type = other DNA
tttttttaagcagtggtatcaacgcagagtacnntgagaaggnnggtcttcanntttttttttttttttttttttttttttttt

SEQ ID NO: 2670 - DNA, 84 bp, synthetic construct
  source 1..84: mol_type = other DNA
tttttttaagcagtggtatcaacgcagagtacnntgagaaggnnaggttcagnntttttttttttttttttttttttttttttt

SEQ ID NO: 2671 - DNA, 84 bp, synthetic construct
  source 1..84: mol_type = other DNA
tttttttaagcagtggtatcaacgcagagtacnntgagaaggnnctagagcanntttttttttttttttttttttttttttttt

SEQ ID NO: 2672 - DNA, 84 bp, synthetic construct
  source 1..84: mol_type = other DNA
tttttttaagcagtggtatcaacgcagagtacnntgagaaggnncttctagcnntttttttttttttttttttttttttttttt

SEQ ID NO: 2673 - DNA, 84 bp, synthetic construct
  source 1..84: mol_type = other DNA
tttttttaagcagtggtatcaacgcagagtacnntgagaaggnngagtaacgnntttttttttttttttttttttttttttttt

SEQ ID NO: 2674 - DNA, 84 bp, synthetic construct
  source 1..84: mol_type = other DNA
tttttttaagcagtggtatcaacgcagagtacnntgagaaggnnctaagaggnntttttttttttttttttttttttttttttt

SEQ ID NO: 2675 - DNA, 84 bp, synthetic construct
  source 1..84: mol_type = other DNA
tttttttaagcagtggtatcaacgcagagtacnntgagaaggnnacgtgtagnntttttttttttttttttttttttttttttt

SEQ ID NO: 2676 - DNA, 84 bp, synthetic construct
  source 1..84: mol_type = other DNA
tttttttaagcagtggtatcaacgcagagtacnntgagaaggnnactacaggnntttttttttttttttttttttttttttttt

SEQ ID NO: 2677 - DNA, 84 bp, synthetic construct
  source 1..84: mol_type = other DNA
tttttttaagcagtggtatcaacgcagagtacnntgagaaggnntacaggtcnntttttttttttttttttttttttttttttt

SEQ ID NO: 2678 - DNA, 84 bp, synthetic construct
  source 1..84: mol_type = other DNA
tttttttaagcagtggtatcaacgcagagtacnntgagaaggnnctcacatgnntttttttttttttttttttttttttttttt

SEQ ID NO: 2679 - DNA, 84 bp, synthetic construct
  source 1..84: mol_type = other DNA
tttttttaagcagtggtatcaacgcagagtacnntgagaaggnnactaggagnntttttttttttttttttttttttttttttt

SEQ ID NO: 2680 - DNA, 84 bp, synthetic construct
  source 1..84: mol_type = other DNA
tttttttaagcagtggtatcaacgcagagtacnntgagaaggnnccatagganntttttttttttttttttttttttttttttt

SEQ ID NO: 2681 - DNA, 84 bp, synthetic construct
  source 1..84: mol_type = other DNA
tttttttaagcagtggtatcaacgcagagtacnntgagaaggnnggagaatcnntttttttttttttttttttttttttttttt

SEQ ID NO: 2682 - DNA, 84 bp, synthetic construct
  source 1..84: mol_type = other DNA
tttttttaagcagtggtatcaacgcagagtacnntgagaaggnngccaagaanntttttttttttttttttttttttttttttt

SEQ ID NO: 2683 - DNA, 84 bp, synthetic construct
  source 1..84: mol_type = other DNA
tttttttaagcagtggtatcaacgcagagtacnntgagaaggnnaaggcaagnntttttttttttttttttttttttttttttt

SEQ ID NO: 2684 - DNA, 84 bp, synthetic construct
  source 1..84: mol_type = other DNA
tttttttaagcagtggtatcaacgcagagtacnntgagaaggnnaatgtcgcnntttttttttttttttttttttttttttttt

SEQ ID NO: 2685 - DNA, 84 bp, synthetic construct
  source 1..84: mol_type = other DNA
tttttttaagcagtggtatcaacgcagagtacnntgagaaggnnatggaaccnntttttttttttttttttttttttttttttt

SEQ ID NO: 2686 - DNA, 84 bp, synthetic construct
  source 1..84: mol_type = other DNA
tttttttaagcagtggtatcaacgcagagtacnntgagaaggnnagaggcatnntttttttttttttttttttttttttttttt

SEQ ID NO: 2687 - DNA, 84 bp, synthetic construct
  source 1..84: mol_type = other DNA
tttttttaagcagtggtatcaacgcagagtacnntgagaaggnntgcatagcnntttttttttttttttttttttttttttttt

SEQ ID NO: 2688 - DNA, 84 bp, synthetic construct
  source 1..84: mol_type = other DNA
tttttttaagcagtggtatcaacgcagagtacnntgagaaggnnctaacgganntttttttttttttttttttttttttttttt

SEQ ID NO: 2689 - DNA, 84 bp, synthetic construct
  source 1..84: mol_type = other DNA
tttttttaagcagtggtatcaacgcagagtacnntgagaaggnntatcgaggnntttttttttttttttttttttttttttttt

SEQ ID NO: 2690 - DNA, 84 bp, synthetic construct
  source 1..84: mol_type = other DNA
tttttttaagcagtggtatcaacgcagagtacnntgagaaggnncatagcctnntttttttttttttttttttttttttttttt

SEQ ID NO: 2691 - DNA, 84 bp, synthetic construct
  source 1..84: mol_type = other DNA
tttttttaagcagtggtatcaacgcagagtacnntgagaaggnnatcgagacnntttttttttttttttttttttttttttttt

SEQ ID NO: 2692 - DNA, 84 bp, synthetic construct
  source 1..84: mol_type = other DNA
tttttttaagcagtggtatcaacgcagagtacnntgagaaggnnggaagagtnntttttttttttttttttttttttttttttt

SEQ ID NO: 2693 - DNA, 84 bp, synthetic construct
  source 1..84: mol_type = other DNA
tttttttaagcagtggtatcaacgcagagtacnntgagaaggnnccaagtagnntttttttttttttttttttttttttttttt

SEQ ID NO: 2694 - DNA, 84 bp, synthetic construct
  source 1..84: mol_type = other DNA
tttttttaagcagtggtatcaacgcagagtacnntgagaaggnnctgaacagnntttttttttttttttttttttttttttttt

SEQ ID NO: 2695 - DNA, 84 bp, synthetic construct
  source 1..84: mol_type = other DNA
tttttttaagcagtggtatcaacgcagagtacnntgagaaggnngtaggttcnntttttttttttttttttttttttttttttt

SEQ ID NO: 2696 - DNA, 84 bp, synthetic construct
  source 1..84: mol_type = other DNA
tttttttaagcagtggtatcaacgcagagtacnntgagaaggnngtatggacnntttttttttttttttttttttttttttttt

SEQ ID NO: 2697 - DNA, 84 bp, synthetic construct
  source 1..84: mol_type = other DNA
tttttttaagcagtggtatcaacgcagagtacnntgagaaggnntcgcaacanntttttttttttttttttttttttttttttt

SEQ ID NO: 2698 - DNA, 84 bp, synthetic construct
  source 1..84: mol_type = other DNA
tttttttaagcagtggtatcaacgcagagtacnntgagaaggnnccgctaatnntttttttttttttttttttttttttttttt

SEQ ID NO: 2699 - DNA, 84 bp, synthetic construct
  source 1..84: mol_type = other DNA
tttttttaagcagtggtatcaacgcagagtacnntgagaaggnngattcgcanntttttttttttttttttttttttttttttt

SEQ ID NO: 2700 - DNA, 84 bp, synthetic construct
  source 1..84: mol_type = other DNA
tttttttaagcagtggtatcaacgcagagtacnntgagaaggnncgatggaanntttttttttttttttttttttttttttttt

SEQ ID NO: 2701 - DNA, 84 bp, synthetic construct
  source 1..84: mol_type = other DNA
tttttttaagcagtggtatcaacgcagagtacnntgagaaggnnagcaagganntttttttttttttttttttttttttttttt

SEQ ID NO: 2702 - DNA, 84 bp, synthetic construct
  source 1..84: mol_type = other DNA
tttttttaagcagtggtatcaacgcagagtacnntgagaaggnncgtagcaanntttttttttttttttttttttttttttttt

SEQ ID NO: 2703 - DNA, 84 bp, synthetic construct
  source 1..84: mol_type = other DNA
tttttttaagcagtggtatcaacgcagagtacnntgagaaggnntggcagtanntttttttttttttttttttttttttttttt

SEQ ID NO: 2704 - DNA, 84 bp, synthetic construct
  source 1..84: mol_type = other DNA
tttttttaagcagtggtatcaacgcagagtacnntgagaaggnncggtagttnntttttttttttttttttttttttttttttt

SEQ ID NO: 2705 - DNA, 84 bp, synthetic construct
  source 1..84: mol_type = other DNA
tttttttaagcagtggtatcaacgcagagtacnntgagaaggnntgacttcgnntttttttttttttttttttttttttttttt

SEQ ID NO: 2706 - DNA, 84 bp, synthetic construct
  source 1..84: mol_type = other DNA
tttttttaagcagtggtatcaacgcagagtacnntgagaaggnngagtgcaanntttttttttttttttttttttttttttttt

SEQ ID NO: 2707 - DNA, 84 bp, synthetic construct
  source 1..84: mol_type = other DNA
tttttttaagcagtggtatcaacgcagagtacnntgagaaggnnacggtaacnntttttttttttttttttttttttttttttt

SEQ ID NO: 2708 - DNA, 84 bp, synthetic construct
  source 1..84: mol_type = other DNA
tttttttaagcagtggtatcaacgcagagtacnntgagaaggnnaagtggtgnntttttttttttttttttttttttttttttt

SEQ ID NO: 2709 - DNA, 84 bp, synthetic construct
  source 1..84: mol_type = other DNA
tttttttaagcagtggtatcaacgcagagtacnntgagaaggnnggagacaanntttttttttttttttttttttttttttttt

SEQ ID NO: 2710 - DNA, 84 bp, synthetic construct
  source 1..84: mol_type = other DNA
tttttttaagcagtggtatcaacgcagagtacnntgagaaggnntcaaggacnntttttttttttttttttttttttttttttt

SEQ ID NO: 2711 - DNA, 84 bp, synthetic construct
  source 1..84: mol_type = other DNA
tttttttaagcagtggtatcaacgcagagtacnntgagaaggnnaagagagcnntttttttttttttttttttttttttttttt

SEQ ID NO: 2712 - DNA, 84 bp, synthetic construct
  source 1..84: mol_type = other DNA
tttttttaagcagtggtatcaacgcagagtacnntgagaaggnncgagagatnntttttttttttttttttttttttttttttt

SEQ ID NO: 2713 - DNA, 84 bp, synthetic construct
  source 1..84: mol_type = other DNA
tttttttaagcagtggtatcaacgcagagtacnntgagaaggnnacagatggnntttttttttttttttttttttttttttttt

SEQ ID NO: 2714 - DNA, 84 bp, synthetic construct
  source 1..84: mol_type = other DNA
tttttttaagcagtggtatcaacgcagagtacnntgagaaggnnaggagtcanntttttttttttttttttttttttttttttt

SEQ ID NO: 2715 - DNA, 84 bp, synthetic construct
  source 1..84: mol_type = other DNA
tttttttaagcagtggtatcaacgcagagtacnntgagaaggnncgtgttacnntttttttttttttttttttttttttttttt

SEQ ID NO: 2716 - DNA, 84 bp, synthetic construct
  source 1..84: mol_type = other DNA
tttttttaagcagtggtatcaacgcagagtacnntgagaaggnntagtgtgcnntttttttttttttttttttttttttttttt

SEQ ID NO: 2717 - DNA, 84 bp, synthetic construct
  source 1..84: mol_type = other DNA
tttttttaagcagtggtatcaacgcagagtacnntgagaaggnnctcatgacnntttttttttttttttttttttttttttttt

SEQ ID NO: 2718 - DNA, 84 bp, synthetic construct
  source 1..84: mol_type = other DNA
tttttttaagcagtggtatcaacgcagagtacnntgagaaggnngtatccagnntttttttttttttttttttttttttttttt

SEQ ID NO: 2719 - DNA, 84 bp, synthetic construct
  source 1..84: mol_type = other DNA
tttttttaagcagtggtatcaacgcagagtacnntgagaaggnnacgcctatnntttttttttttttttttttttttttttttt

SEQ ID NO: 2720 - DNA, 84 bp, synthetic construct
  source 1..84: mol_type = other DNA
tttttttaagcagtggtatcaacgcagagtacnntgagaaggnnaacgacctnntttttttttttttttttttttttttttttt

SEQ ID NO: 2721 - DNA, 84 bp, synthetic construct
  source 1..84: mol_type = other DNA
tttttttaagcagtggtatcaacgcagagtacnntgagaaggnnatcaggctnntttttttttttttttttttttttttttttt

SEQ ID NO: 2722 - DNA, 84 bp, synthetic construct
  source 1..84: mol_type = other DNA
tttttttaagcagtggtatcaacgcagagtacnntgagaaggnncaagttcgnntttttttttttttttttttttttttttttt

SEQ ID NO: 2723 - DNA, 84 bp, synthetic construct
  source 1..84: mol_type = other DNA
tttttttaagcagtggtatcaacgcagagtacnntgagaaggnntagccaganntttttttttttttttttttttttttttttt

SEQ ID NO: 2724 - DNA, 84 bp, synthetic construct
  source 1..84: mol_type = other DNA
tttttttaagcagtggtatcaacgcagagtacnntgagaaggnncaatcacgnntttttttttttttttttttttttttttttt

SEQ ID NO: 2725 - DNA, 84 bp, synthetic construct
  source 1..84: mol_type = other DNA
tttttttaagcagtggtatcaacgcagagtacnntgagaaggnngcaacaagnntttttttttttttttttttttttttttttt

SEQ ID NO: 2726 - DNA, 84 bp, synthetic construct
  source 1..84: mol_type = other DNA
tttttttaagcagtggtatcaacgcagagtacnntgagaaggnncacgacaanntttttttttttttttttttttttttttttt

SEQ ID NO: 2727 - DNA, 84 bp, synthetic construct
  source 1..84: mol_type = other DNA
tttttttaagcagtggtatcaacgcagagtacnntgagaaggnntacggaganntttttttttttttttttttttttttttttt

SEQ ID NO: 2728 - DNA, 84 bp, synthetic construct
  source 1..84: mol_type = other DNA
tttttttaagcagtggtatcaacgcagagtacnntgagaaggnncgacaaganntttttttttttttttttttttttttttttt

SEQ ID NO: 2729 - DNA, 84 bp, synthetic construct
  source 1..84: mol_type = other DNA
tttttttaagcagtggtatcaacgcagagtacnntgagaaggnncgaagtganntttttttttttttttttttttttttttttt

SEQ ID NO: 2730 - DNA, 84 bp, synthetic construct
  source 1..84: mol_type = other DNA
tttttttaagcagtggtatcaacgcagagtacnntgagaaggnnagctggtanntttttttttttttttttttttttttttttt

SEQ ID NO: 2731 - DNA, 84 bp, synthetic construct
  source 1..84: mol_type = other DNA
tttttttaagcagtggtatcaacgcagagtacnntgagaaggnnaactaggcnntttttttttttttttttttttttttttttt

SEQ ID NO: 2732 - DNA, 84 bp, synthetic construct
  source 1..84: mol_type = other DNA
tttttttaagcagtggtatcaacgcagagtacnntgagaaggnncagcaagtnntttttttttttttttttttttttttttttt

SEQ ID NO: 2733 - DNA, 84 bp, synthetic construct
  source 1..84: mol_type = other DNA
tttttttaagcagtggtatcaacgcagagtacnntgagaaggnnacgaggtanntttttttttttttttttttttttttttttt

SEQ ID NO: 2734 - DNA, 84 bp, synthetic construct
  source 1..84: mol_type = other DNA
tttttttaagcagtggtatcaacgcagagtacnntgagaaggnncatcttccnntttttttttttttttttttttttttttttt

SEQ ID NO: 2735 - DNA, 84 bp, synthetic construct
  source 1..84: mol_type = other DNA
tttttttaagcagtggtatcaacgcagagtacnntgagaaggnncctgaatcnntttttttttttttttttttttttttttttt

SEQ ID NO: 2736 - DNA, 84 bp, synthetic construct
  source 1..84: mol_type = other DNA
tttttttaagcagtggtatcaacgcagagtacnntgagaaggnntgcagactnntttttttttttttttttttttttttttttt

SEQ ID NO: 2737 - DNA, 84 bp, synthetic construct
  source 1..84: mol_type = other DNA
tttttttaagcagtggtatcaacgcagagtacnntgagaaggnnagatgtggnntttttttttttttttttttttttttttttt

SEQ ID NO: 2738 - DNA, 84 bp, synthetic construct
  source 1..84: mol_type = other DNA
tttttttaagcagtggtatcaacgcagagtacnntgagaaggnnagttcgacnntttttttttttttttttttttttttttttt

SEQ ID NO: 2739 - DNA, 84 bp, synthetic construct
  source 1..84: mol_type = other DNA
tttttttaagcagtggtatcaacgcagagtacnntgagaaggnnacaacctcnntttttttttttttttttttttttttttttt

SEQ ID NO: 2740 - DNA, 84 bp, synthetic construct
  source 1..84: mol_type = other DNA
tttttttaagcagtggtatcaacgcagagtacnntgagaaggnncatggtagnntttttttttttttttttttttttttttttt

SEQ ID NO: 2741 - DNA, 84 bp, synthetic construct
  source 1..84: mol_type = other DNA
tttttttaagcagtggtatcaacgcagagtacnntgagaaggnncgtatctcnntttttttttttttttttttttttttttttt

SEQ ID NO: 2742 - DNA, 84 bp, synthetic construct
  source 1..84: mol_type = other DNA
tttttttaagcagtggtatcaacgcagagtacnntgagaaggnncctagttcnntttttttttttttttttttttttttttttt

SEQ ID NO: 2743 - DNA, 84 bp, synthetic construct
  source 1..84: mol_type = other DNA
tttttttaagcagtggtatcaacgcagagtacnntgagaaggnncaagagtcnntttttttttttttttttttttttttttttt

SEQ ID NO: 2744 - DNA, 84 bp, synthetic construct
  source 1..84: mol_type = other DNA
tttttttaagcagtggtatcaacgcagagtacnngtcgatgtnnaatcggcanntttttttttttttttttttttttttttttt

SEQ ID NO: 2745 - DNA, 84 bp, synthetic construct
  source 1..84: mol_type = other DNA
tttttttaagcagtggtatcaacgcagagtacnngtcgatgtnntacggcatnntttttttttttttttttttttttttttttt

SEQ ID NO: 2746 - DNA, 84 bp, synthetic construct
  source 1..84: mol_type = other DNA
tttttttaagcagtggtatcaacgcagagtacnngtcgatgtnnttggatcgnntttttttttttttttttttttttttttttt

SEQ ID NO: 2747 - DNA, 84 bp, synthetic construct
  source 1..84: mol_type = other DNA
tttttttaagcagtggtatcaacgcagagtacnngtcgatgtnntggaacganntttttttttttttttttttttttttttttt

SEQ ID NO: 2748 - DNA, 84 bp, synthetic construct
  source 1..84: mol_type = other DNA
tttttttaagcagtggtatcaacgcagagtacnngtcgatgtnnggcaatcanntttttttttttttttttttttttttttttt

SEQ ID NO: 2749 - DNA, 84 bp, synthetic construct
  source 1..84: mol_type = other DNA
tttttttaagcagtggtatcaacgcagagtacnngtcgatgtnngaatccganntttttttttttttttttttttttttttttt

SEQ ID NO: 2750 - DNA, 84 bp, synthetic construct
  source 1..84: mol_type = other DNA
tttttttaagcagtggtatcaacgcagagtacnngtcgatgtnnttacggtgnntttttttttttttttttttttttttttttt

SEQ ID NO: 2751 - DNA, 84 bp, synthetic construct
  source 1..84: mol_type = other DNA
tttttttaagcagtggtatcaacgcagagtacnngtcgatgtnncatatcggnntttttttttttttttttttttttttttttt

SEQ ID NO: 2752 - DNA, 84 bp, synthetic construct
  source 1..84: mol_type = other DNA
tttttttaagcagtggtatcaacgcagagtacnngtcgatgtnncttcggtanntttttttttttttttttttttttttttttt

SEQ ID NO: 2753 - DNA, 84 bp, synthetic construct
  source 1..84: mol_type = other DNA
tttttttaagcagtggtatcaacgcagagtacnngtcgatgtnntcctaacgnntttttttttttttttttttttttttttttt

SEQ ID NO: 2754 - DNA, 84 bp, synthetic construct
  source 1..84: mol_type = other DNA
tttttttaagcagtggtatcaacgcagagtacnngtcgatgtnngtaagccanntttttttttttttttttttttttttttttt

SEQ ID NO: 2755 - DNA, 84 bp, synthetic construct
  source 1..84: mol_type = other DNA
tttttttaagcagtggtatcaacgcagagtacnngtcgatgtnntaaggtggnntttttttttttttttttttttttttttttt

SEQ ID NO: 2756 - DNA, 84 bp, synthetic construct
  source 1..84: mol_type = other DNA
tttttttaagcagtggtatcaacgcagagtacnngtcgatgtnnggtaagctnntttttttttttttttttttttttttttttt

SEQ ID NO: 2757 - DNA, 84 bp, synthetic construct
  source 1..84: mol_type = other DNA
tttttttaagcagtggtatcaacgcagagtacnngtcgatgtnntgtgtcganntttttttttttttttttttttttttttttt

SEQ ID NO: 2758 - DNA, 84 bp, synthetic construct
  source 1..84: mol_type = other DNA
tttttttaagcagtggtatcaacgcagagtacnngtcgatgtnngagcatganntttttttttttttttttttttttttttttt

SEQ ID NO: 2759 - DNA, 84 bp, synthetic construct
  source 1..84: mol_type = other DNA
tttttttaagcagtggtatcaacgcagagtacnngtcgatgtnntcgaagtcnntttttttttttttttttttttttttttttt

SEQ ID NO: 2760 - DNA, 84 bp, synthetic construct
  source 1..84: mol_type = other DNA
tttttttaagcagtggtatcaacgcagagtacnngtcgatgtnnggtgaacanntttttttttttttttttttttttttttttt

SEQ ID NO: 2761 - DNA, 84 bp, synthetic construct
  source 1..84: mol_type = other DNA
tttttttaagcagtggtatcaacgcagagtacnngtcgatgtnnacatgcacnntttttttttttttttttttttttttttttt

SEQ ID NO: 2762 - DNA, 84 bp, synthetic construct
  source 1..84: mol_type = other DNA
tttttttaagcagtggtatcaacgcagagtacnngtcgatgtnnccaacagtnntttttttttttttttttttttttttttttt

SEQ ID NO: 2763 - DNA, 84 bp, synthetic construct
  source 1..84: mol_type = other DNA
tttttttaagcagtggtatcaacgcagagtacnngtcgatgtnnagaacagcnntttttttttttttttttttttttttttttt

SEQ ID NO: 2764 - DNA, 84 bp, synthetic construct
  source 1..84: mol_type = other DNA
tttttttaagcagtggtatcaacgcagagtacnngtcgatgtnngaacacgtnntttttttttttttttttttttttttttttt

SEQ ID NO: 2765 - DNA, 84 bp, synthetic construct
  source 1..84: mol_type = other DNA
tttttttaagcagtggtatcaacgcagagtacnngtcgatgtnnggtcttcanntttttttttttttttttttttttttttttt

SEQ ID NO: 2766 - DNA, 84 bp, synthetic construct
  source 1..84: mol_type = other DNA
tttttttaagcagtggtatcaacgcagagtacnngtcgatgtnnaggttcagnntttttttttttttttttttttttttttttt

SEQ ID NO: 2767 - DNA, 84 bp, synthetic construct
  source 1..84: mol_type = other DNA
tttttttaagcagtggtatcaacgcagagtacnngtcgatgtnnctagagcanntttttttttttttttttttttttttttttt

SEQ ID NO: 2768 - DNA, 84 bp, synthetic construct
  source 1..84: mol_type = other DNA
tttttttaagcagtggtatcaacgcagagtacnngtcgatgtnncttctagcnntttttttttttttttttttttttttttttt

SEQ ID NO: 2769 - DNA, 84 bp, synthetic construct
  source 1..84: mol_type = other DNA
tttttttaagcagtggtatcaacgcagagtacnngtcgatgtnngagtaacgnntttttttttttttttttttttttttttttt

SEQ ID NO: 2770 - DNA, 84 bp, synthetic construct
  source 1..84: mol_type = other DNA
tttttttaagcagtggtatcaacgcagagtacnngtcgatgtnnctaagaggnntttttttttttttttttttttttttttttt

SEQ ID NO: 2771 - DNA, 84 bp, synthetic construct
  source 1..84: mol_type = other DNA
tttttttaagcagtggtatcaacgcagagtacnngtcgatgtnnacgtgtagnntttttttttttttttttttttttttttttt

SEQ ID NO: 2772 - DNA, 84 bp, synthetic construct
  source 1..84: mol_type = other DNA
tttttttaagcagtggtatcaacgcagagtacnngtcgatgtnnactacaggnntttttttttttttttttttttttttttttt

SEQ ID NO: 2773 - DNA, 84 bp, synthetic construct
  source 1..84: mol_type = other DNA
tttttttaagcagtggtatcaacgcagagtacnngtcgatgtnntacaggtcnntttttttttttttttttttttttttttttt

SEQ ID NO: 2774 - DNA, 84 bp, synthetic construct
  source 1..84: mol_type = other DNA
tttttttaagcagtggtatcaacgcagagtacnngtcgatgtnnctcacatgnntttttttttttttttttttttttttttttt

SEQ ID NO: 2775 - DNA, 84 bp, synthetic construct
  source 1..84: mol_type = other DNA
tttttttaagcagtggtatcaacgcagagtacnngtcgatgtnnactaggagnntttttttttttttttttttttttttttttt

SEQ ID NO: 2776 - DNA, 84 bp, synthetic construct
  source 1..84: mol_type = other DNA
tttttttaagcagtggtatcaacgcagagtacnngtcgatgtnnccatagganntttttttttttttttttttttttttttttt

SEQ ID NO: 2777 - DNA, 84 bp, synthetic construct
  source 1..84: mol_type = other DNA
tttttttaagcagtggtatcaacgcagagtacnngtcgatgtnnggagaatcnntttttttttttttttttttttttttttttt

SEQ ID NO: 2778 - DNA, 84 bp, synthetic construct
  source 1..84: mol_type = other DNA
tttttttaagcagtggtatcaacgcagagtacnngtcgatgtnngccaagaanntttttttttttttttttttttttttttttt

SEQ ID NO: 2779 - DNA, 84 bp, synthetic construct
  source 1..84: mol_type = other DNA
tttttttaagcagtggtatcaacgcagagtacnngtcgatgtnnaaggcaagnntttttttttttttttttttttttttttttt

SEQ ID NO: 2780 - DNA, 84 bp, synthetic construct
  source 1..84: mol_type = other DNA
tttttttaagcagtggtatcaacgcagagtacnngtcgatgtnnaatgtcgcnntttttttttttttttttttttttttttttt

SEQ ID NO: 2781 - DNA, 84 bp, synthetic construct
  source 1..84: mol_type = other DNA
tttttttaagcagtggtatcaacgcagagtacnngtcgatgtnnatggaaccnntttttttttttttttttttttttttttttt

SEQ ID NO: 2782 - DNA, 84 bp, synthetic construct
  source 1..84: mol_type = other DNA
tttttttaagcagtggtatcaacgcagagtacnngtcgatgtnnagaggcatnntttttttttttttttttttttttttttttt

SEQ ID NO: 2783 - DNA, 84 bp, synthetic construct
  source 1..84: mol_type = other DNA
tttttttaagcagtggtatcaacgcagagtacnngtcgatgtnntgcatagcnntttttttttttttttttttttttttttttt

SEQ ID NO: 2784 - DNA, 84 bp, synthetic construct
  source 1..84: mol_type = other DNA
tttttttaagcagtggtatcaacgcagagtacnngtcgatgtnnctaacgganntttttttttttttttttttttttttttttt

SEQ ID NO: 2785 - DNA, 84 bp, synthetic construct
  source 1..84: mol_type = other DNA
tttttttaagcagtggtatcaacgcagagtacnngtcgatgtnntatcgaggnntttttttttttttttttttttttttttttt

SEQ ID NO: 2786 - DNA, 84 bp, synthetic construct
  source 1..84: mol_type = other DNA
tttttttaagcagtggtatcaacgcagagtacnngtcgatgtnncatagcctnntttttttttttttttttttttttttttttt

SEQ ID NO: 2787 - DNA, 84 bp, synthetic construct
  source 1..84: mol_type = other DNA
tttttttaagcagtggtatcaacgcagagtacnngtcgatgtnnatcgagacnntttttttttttttttttttttttttttttt

SEQ ID NO: 2788 - DNA, 84 bp, synthetic construct
  source 1..84: mol_type = other DNA
tttttttaagcagtggtatcaacgcagagtacnngtcgatgtnnggaagagtnntttttttttttttttttttttttttttttt

SEQ ID NO: 2789 - DNA, 84 bp, synthetic construct
  source 1..84: mol_type = other DNA
tttttttaagcagtggtatcaacgcagagtacnngtcgatgtnnccaagtagnntttttttttttttttttttttttttttttt

SEQ ID NO: 2790 - DNA, 84 bp, synthetic construct
  source 1..84: mol_type = other DNA
tttttttaagcagtggtatcaacgcagagtacnngtcgatgtnnctgaacagnntttttttttttttttttttttttttttttt

SEQ ID NO: 2791 - DNA, 84 bp, synthetic construct
  source 1..84: mol_type = other DNA
tttttttaagcagtggtatcaacgcagagtacnngtcgatgtnngtaggttcnntttttttttttttttttttttttttttttt

SEQ ID NO: 2792 - DNA, 84 bp, synthetic construct
  source 1..84: mol_type = other DNA
tttttttaagcagtggtatcaacgcagagtacnngtcgatgtnngtatggacnntttttttttttttttttttttttttttttt

SEQ ID NO: 2793 - DNA, 84 bp, synthetic construct
  source 1..84: mol_type = other DNA
tttttttaagcagtggtatcaacgcagagtacnngtcgatgtnntcgcaacanntttttttttttttttttttttttttttttt

SEQ ID NO: 2794 - DNA, 84 bp, synthetic construct
  source 1..84: mol_type = other DNA
tttttttaagcagtggtatcaacgcagagtacnngtcgatgtnnccgctaatnntttttttttttttttttttttttttttttt

SEQ ID NO: 2795 - DNA, 84 bp, synthetic construct
  source 1..84: mol_type = other DNA
tttttttaagcagtggtatcaacgcagagtacnngtcgatgtnngattcgcanntttttttttttttttttttttttttttttt

SEQ ID NO: 2796 - DNA, 84 bp, synthetic construct
  source 1..84: mol_type = other DNA
tttttttaagcagtggtatcaacgcagagtacnngtcgatgtnncgatggaanntttttttttttttttttttttttttttttt

SEQ ID NO: 2797 - DNA, 84 bp, synthetic construct
  source 1..84: mol_type = other DNA
tttttttaagcagtggtatcaacgcagagtacnngtcgatgtnnagcaagganntttttttttttttttttttttttttttttt

SEQ ID NO: 2798 - DNA, 84 bp, synthetic construct
  source 1..84: mol_type = other DNA
tttttttaagcagtggtatcaacgcagagtacnngtcgatgtnncgtagcaanntttttttttttttttttttttttttttttt

SEQ ID NO: 2799 - DNA, 84 bp, synthetic construct
  source 1..84: mol_type = other DNA
tttttttaagcagtggtatcaacgcagagtacnngtcgatgtnntggcagtanntttttttttttttttttttttttttttttt

SEQ ID NO: 2800 - DNA, 84 bp, synthetic construct
  source 1..84: mol_type = other DNA
tttttttaagcagtggtatcaacgcagagtacnngtcgatgtnncggtagttnntttttttttttttttttttttttttttttt

SEQ ID NO: 2801 - DNA, 84 bp, synthetic construct
  source 1..84: mol_type = other DNA
tttttttaagcagtggtatcaacgcagagtacnngtcgatgtnntgacttcgnntttttttttttttttttttttttttttttt

SEQ ID NO: 2802 - DNA, 84 bp, synthetic construct
  source 1..84: mol_type = other DNA
tttttttaagcagtggtatcaacgcagagtacnngtcgatgtnngagtgcaanntttttttttttttttttttttttttttttt

SEQ ID NO: 2803 - DNA, 84 bp, synthetic construct
  source 1..84: mol_type = other DNA
tttttttaagcagtggtatcaacgcagagtacnngtcgatgtnnacggtaacnntttttttttttttttttttttttttttttt

SEQ ID NO: 2804 - DNA, 84 bp, synthetic construct
  source 1..84: mol_type = other DNA
tttttttaagcagtggtatcaacgcagagtacnngtcgatgtnnaagtggtgnntttttttttttttttttttttttttttttt

SEQ ID NO: 2805 - DNA, 84 bp, synthetic construct
  source 1..84: mol_type = other DNA
tttttttaagcagtggtatcaacgcagagtacnngtcgatgtnnggagacaanntttttttttttttttttttttttttttttt

SEQ ID NO: 2806 - DNA, 84 bp, synthetic construct
  source 1..84: mol_type = other DNA
tttttttaagcagtggtatcaacgcagagtacnngtcgatgtnntcaaggacnntttttttttttttttttttttttttttttt

SEQ ID NO: 2807 - DNA, 84 bp, synthetic construct
  source 1..84: mol_type = other DNA
tttttttaagcagtggtatcaacgcagagtacnngtcgatgtnnaagagagcnntttttttttttttttttttttttttttttt

SEQ ID NO: 2808 - DNA, 84 bp, synthetic construct
  source 1..84: mol_type = other DNA
tttttttaagcagtggtatcaacgcagagtacnngtcgatgtnncgagagatnntttttttttttttttttttttttttttttt

SEQ ID NO: 2809 - DNA, 84 bp, synthetic construct
  source 1..84: mol_type = other DNA
tttttttaagcagtggtatcaacgcagagtacnngtcgatgtnnacagatggnntttttttttttttttttttttttttttttt

SEQ ID NO: 2810 - DNA, 84 bp, synthetic construct
  source 1..84: mol_type = other DNA
tttttttaagcagtggtatcaacgcagagtacnngtcgatgtnnaggagtcanntttttttttttttttttttttttttttttt

SEQ ID NO: 2811 - DNA, 84 bp, synthetic construct
  source 1..84: mol_type = other DNA
tttttttaagcagtggtatcaacgcagagtacnngtcgatgtnncgtgttacnntttttttttttttttttttttttttttttt

SEQ ID NO: 2812 - DNA, 84 bp, synthetic construct
  source 1..84: mol_type = other DNA
tttttttaagcagtggtatcaacgcagagtacnngtcgatgtnntagtgtgcnntttttttttttttttttttttttttttttt

SEQ ID NO: 2813 - DNA, 84 bp, synthetic construct
  source 1..84: mol_type = other DNA
tttttttaagcagtggtatcaacgcagagtacnngtcgatgtnnctcatgacnntttttttttttttttttttttttttttttt

SEQ ID NO: 2814 - DNA, 84 bp, synthetic construct
  source 1..84: mol_type = other DNA
tttttttaagcagtggtatcaacgcagagtacnngtcgatgtnngtatccagnntttttttttttttttttttttttttttttt

SEQ ID NO: 2815 - DNA, 84 bp, synthetic construct
  source 1..84: mol_type = other DNA
tttttttaagcagtggtatcaacgcagagtacnngtcgatgtnnacgcctatnntttttttttttttttttttttttttttttt

SEQ ID NO: 2816 - DNA, 84 bp, synthetic construct
  source 1..84: mol_type = other DNA
tttttttaagcagtggtatcaacgcagagtacnngtcgatgtnnaacgacctnntttttttttttttttttttttttttttttt

SEQ ID NO: 2817 - DNA, 84 bp, synthetic construct
  source 1..84: mol_type = other DNA
tttttttaagcagtggtatcaacgcagagtacnngtcgatgtnnatcaggctnntttttttttttttttttttttttttttttt

SEQ ID NO: 2818 - DNA, 84 bp, synthetic construct
  source 1..84: mol_type = other DNA
tttttttaagcagtggtatcaacgcagagtacnngtcgatgtnncaagttcgnntttttttttttttttttttttttttttttt

SEQ ID NO: 2819 - DNA, 84 bp, synthetic construct
  source 1..84: mol_type = other DNA
tttttttaagcagtggtatcaacgcagagtacnngtcgatgtnntagccaganntttttttttttttttttttttttttttttt

SEQ ID NO: 2820 - DNA, 84 bp, synthetic construct
  source 1..84: mol_type = other DNA
tttttttaagcagtggtatcaacgcagagtacnngtcgatgtnncaatcacgnntttttttttttttttttttttttttttttt

SEQ ID NO: 2821 - DNA, 84 bp, synthetic construct
  source 1..84: mol_type = other DNA
tttttttaagcagtggtatcaacgcagagtacnngtcgatgtnngcaacaagnntttttttttttttttttttttttttttttt

SEQ ID NO: 2822 - DNA, 84 bp, synthetic construct
  source 1..84: mol_type = other DNA
tttttttaagcagtggtatcaacgcagagtacnngtcgatgtnncacgacaanntttttttttttttttttttttttttttttt

SEQ ID NO: 2823 - DNA, 84 bp, synthetic construct
  source 1..84: mol_type = other DNA
tttttttaagcagtggtatcaacgcagagtacnngtcgatgtnntacggaganntttttttttttttttttttttttttttttt

SEQ ID NO: 2824 - DNA, 84 bp, synthetic construct
  source 1..84: mol_type = other DNA
tttttttaagcagtggtatcaacgcagagtacnngtcgatgtnncgacaaganntttttttttttttttttttttttttttttt

SEQ ID NO: 2825 - DNA, 84 bp, synthetic construct
  source 1..84: mol_type = other DNA
tttttttaagcagtggtatcaacgcagagtacnngtcgatgtnncgaagtganntttttttttttttttttttttttttttttt

SEQ ID NO: 2826 - DNA, 84 bp, synthetic construct
  source 1..84: mol_type = other DNA
tttttttaagcagtggtatcaacgcagagtacnngtcgatgtnnagctggtanntttttttttttttttttttttttttttttt

SEQ ID NO: 2827 - DNA, 84 bp, synthetic construct
  source 1..84: mol_type = other DNA
tttttttaagcagtggtatcaacgcagagtacnngtcgatgtnnaactaggcnntttttttttttttttttttttttttttttt

SEQ ID NO: 2828 - DNA, 84 bp, synthetic construct
  source 1..84: mol_type = other DNA
tttttttaagcagtggtatcaacgcagagtacnngtcgatgtnncagcaagtnntttttttttttttttttttttttttttttt

SEQ ID NO: 2829 - DNA, 84 bp, synthetic construct
  source 1..84: mol_type = other DNA
tttttttaagcagtggtatcaacgcagagtacnngtcgatgtnnacgaggtanntttttttttttttttttttttttttttttt

SEQ ID NO: 2830 - DNA, 84 bp, synthetic construct
  source 1..84: mol_type = other DNA
tttttttaagcagtggtatcaacgcagagtacnngtcgatgtnncatcttccnntttttttttttttttttttttttttttttt

SEQ ID NO: 2831 - DNA, 84 bp, synthetic construct
  source 1..84: mol_type = other DNA
tttttttaagcagtggtatcaacgcagagtacnngtcgatgtnncctgaatcnntttttttttttttttttttttttttttttt

SEQ ID NO: 2832 - DNA, 84 bp, synthetic construct
  source 1..84: mol_type = other DNA
tttttttaagcagtggtatcaacgcagagtacnngtcgatgtnntgcagactnntttttttttttttttttttttttttttttt

SEQ ID NO: 2833 - DNA, 84 bp, synthetic construct
  source 1..84: mol_type = other DNA
tttttttaagcagtggtatcaacgcagagtacnngtcgatgtnnagatgtggnntttttttttttttttttttttttttttttt

SEQ ID NO: 2834 - DNA, 84 bp, synthetic construct
  source 1..84: mol_type = other DNA
tttttttaagcagtggtatcaacgcagagtacnngtcgatgtnnagttcgacnntttttttttttttttttttttttttttttt

SEQ ID NO: 2835 - DNA, 84 bp, synthetic construct
  source 1..84: mol_type = other DNA
tttttttaagcagtggtatcaacgcagagtacnngtcgatgtnnacaacctcnntttttttttttttttttttttttttttttt

SEQ ID NO: 2836 - DNA, 84 bp, synthetic construct
  source 1..84: mol_type = other DNA
tttttttaagcagtggtatcaacgcagagtacnngtcgatgtnncatggtagnntttttttttttttttttttttttttttttt

SEQ ID NO: 2837 - DNA, 84 bp, synthetic construct
  source 1..84: mol_type = other DNA
tttttttaagcagtggtatcaacgcagagtacnngtcgatgtnncgtatctcnntttttttttttttttttttttttttttttt

SEQ ID NO: 2838 - DNA, 84 bp, synthetic construct
  source 1..84: mol_type = other DNA
tttttttaagcagtggtatcaacgcagagtacnngtcgatgtnncctagttcnntttttttttttttttttttttttttttttt

SEQ ID NO: 2839 - DNA, 84 bp, synthetic construct
  source 1..84: mol_type = other DNA
tttttttaagcagtggtatcaacgcagagtacnngtcgatgtnncaagagtcnntttttttttttttttttttttttttttttt

SEQ ID NO: 2840 - DNA, 84 bp, synthetic construct
  source 1..84: mol_type = other DNA
tttttttaagcagtggtatcaacgcagagtacnngaaggactnnaatcggcanntttttttttttttttttttttttttttttt

SEQ ID NO: 2841 - DNA, 84 bp, synthetic construct
  source 1..84: mol_type = other DNA
tttttttaagcagtggtatcaacgcagagtacnngaaggactnntacggcatnntttttttttttttttttttttttttttttt

SEQ ID NO: 2842 - DNA, 84 bp, synthetic construct
  source 1..84: mol_type = other DNA
tttttttaagcagtggtatcaacgcagagtacnngaaggactnnttggatcgnntttttttttttttttttttttttttttttt

SEQ ID NO: 2843 - DNA, 84 bp, synthetic construct
  source 1..84: mol_type = other DNA
tttttttaagcagtggtatcaacgcagagtacnngaaggactnntggaacganntttttttttttttttttttttttttttttt

SEQ ID NO: 2844 - DNA, 84 bp, synthetic construct
  source 1..84: mol_type = other DNA
tttttttaagcagtggtatcaacgcagagtacnngaaggactnnggcaatcanntttttttttttttttttttttttttttttt

SEQ ID NO: 2845 - DNA, 84 bp, synthetic construct
  source 1..84: mol_type = other DNA
tttttttaagcagtggtatcaacgcagagtacnngaaggactnngaatccganntttttttttttttttttttttttttttttt

SEQ ID NO: 2846 - DNA, 84 bp, synthetic construct
  source 1..84: mol_type = other DNA
tttttttaagcagtggtatcaacgcagagtacnngaaggactnnttacggtgnntttttttttttttttttttttttttttttt

SEQ ID NO: 2847 - DNA, 84 bp, synthetic construct
  source 1..84: mol_type = other DNA
tttttttaagcagtggtatcaacgcagagtacnngaaggactnncatatcggnntttttttttttttttttttttttttttttt

SEQ ID NO: 2848 - DNA, 84 bp, synthetic construct
  source 1..84: mol_type = other DNA
tttttttaagcagtggtatcaacgcagagtacnngaaggactnncttcggtanntttttttttttttttttttttttttttttt

SEQ ID NO: 2849 - DNA, 84 bp, synthetic construct
  source 1..84: mol_type = other DNA
tttttttaagcagtggtatcaacgcagagtacnngaaggactnntcctaacgnntttttttttttttttttttttttttttttt

SEQ ID NO: 2850 - DNA, 84 bp, synthetic construct
  source 1..84: mol_type = other DNA
tttttttaagcagtggtatcaacgcagagtacnngaaggactnngtaagccanntttttttttttttttttttttttttttttt

SEQ ID NO: 2851 - DNA, 84 bp, synthetic construct
  source 1..84: mol_type = other DNA
tttttttaagcagtggtatcaacgcagagtacnngaaggactnntaaggtggnntttttttttttttttttttttttttttttt

SEQ ID NO: 2852 - DNA, 84 bp, synthetic construct
  source 1..84: mol_type = other DNA
tttttttaagcagtggtatcaacgcagagtacnngaaggactnnggtaagctnntttttttttttttttttttttttttttttt

SEQ ID NO: 2853 - DNA, 84 bp, synthetic construct
  source 1..84: mol_type = other DNA
tttttttaagcagtggtatcaacgcagagtacnngaaggactnntgtgtcganntttttttttttttttttttttttttttttt

SEQ ID NO: 2854 - DNA, 84 bp, synthetic construct
  source 1..84: mol_type = other DNA
tttttttaagcagtggtatcaacgcagagtacnngaaggactnngagcatganntttttttttttttttttttttttttttttt

SEQ ID NO: 2855 - DNA, 84 bp, synthetic construct
  source 1..84: mol_type = other DNA
tttttttaagcagtggtatcaacgcagagtacnngaaggactnntcgaagtcnntttttttttttttttttttttttttttttt

SEQ ID NO: 2856 - DNA, 84 bp, synthetic construct
  source 1..84: mol_type = other DNA
tttttttaagcagtggtatcaacgcagagtacnngaaggactnnggtgaacanntttttttttttttttttttttttttttttt

SEQ ID NO: 2857 - DNA, 84 bp, synthetic construct
  source 1..84: mol_type = other DNA
tttttttaagcagtggtatcaacgcagagtacnngaaggactnnacatgcacnntttttttttttttttttttttttttttttt

SEQ ID NO: 2858 - DNA, 84 bp, synthetic construct
  source 1..84: mol_type = other DNA
tttttttaagcagtggtatcaacgcagagtacnngaaggactnnccaacagtnntttttttttttttttttttttttttttttt

SEQ ID NO: 2859 - DNA, 84 bp, synthetic construct
  source 1..84: mol_type = other DNA
tttttttaagcagtggtatcaacgcagagtacnngaaggactnnagaacagcnntttttttttttttttttttttttttttttt

SEQ ID NO: 2860 - DNA, 84 bp, synthetic construct
  source 1..84: mol_type = other DNA
tttttttaagcagtggtatcaacgcagagtacnngaaggactnngaacacgtnntttttttttttttttttttttttttttttt

SEQ ID NO: 2861 - DNA, 84 bp, synthetic construct
  source 1..84: mol_type = other DNA
tttttttaagcagtggtatcaacgcagagtacnngaaggactnnggtcttcanntttttttttttttttttttttttttttttt

SEQ ID NO: 2862 - DNA, 84 bp, synthetic construct
  source 1..84: mol_type = other DNA
tttttttaagcagtggtatcaacgcagagtacnngaaggactnnaggttcagnntttttttttttttttttttttttttttttt

SEQ ID NO: 2863 - DNA, 84 bp, synthetic construct
  source 1..84: mol_type = other DNA
tttttttaagcagtggtatcaacgcagagtacnngaaggactnnctagagcanntttttttttttttttttttttttttttttt

SEQ ID NO: 2864 - DNA, 84 bp, synthetic construct
  source 1..84: mol_type = other DNA
tttttttaagcagtggtatcaacgcagagtacnngaaggactnncttctagcnntttttttttttttttttttttttttttttt

SEQ ID NO: 2865 - DNA, 84 bp, synthetic construct
  source 1..84: mol_type = other DNA
tttttttaagcagtggtatcaacgcagagtacnngaaggactnngagtaacgnntttttttttttttttttttttttttttttt

SEQ ID NO: 2866 - DNA, 84 bp, synthetic construct
  source 1..84: mol_type = other DNA
tttttttaagcagtggtatcaacgcagagtacnngaaggactnnctaagaggnntttttttttttttttttttttttttttttt

SEQ ID NO: 2867 - DNA, 84 bp, synthetic construct
  source 1..84: mol_type = other DNA
tttttttaagcagtggtatcaacgcagagtacnngaaggactnnacgtgtagnntttttttttttttttttttttttttttttt

SEQ ID NO: 2868 - DNA, 84 bp, synthetic construct
  source 1..84: mol_type = other DNA
tttttttaagcagtggtatcaacgcagagtacnngaaggactnnactacaggnntttttttttttttttttttttttttttttt

SEQ ID NO: 2869 - DNA, 84 bp, synthetic construct
  source 1..84: mol_type = other DNA
tttttttaagcagtggtatcaacgcagagtacnngaaggactnntacaggtcnntttttttttttttttttttttttttttttt

SEQ ID NO: 2870 - DNA, 84 bp, synthetic construct
  source 1..84: mol_type = other DNA
tttttttaagcagtggtatcaacgcagagtacnngaaggactnnctcacatgnntttttttttttttttttttttttttttttt

SEQ ID NO: 2871 - DNA, 84 bp, synthetic construct
  source 1..84: mol_type = other DNA
tttttttaagcagtggtatcaacgcagagtacnngaaggactnnactaggagnntttttttttttttttttttttttttttttt

SEQ ID NO: 2872 - DNA, 84 bp, synthetic construct
  source 1..84: mol_type = other DNA
tttttttaagcagtggtatcaacgcagagtacnngaaggactnnccatagganntttttttttttttttttttttttttttttt

SEQ ID NO: 2873 - DNA, 84 bp, synthetic construct
  source 1..84: mol_type = other DNA
tttttttaagcagtggtatcaacgcagagtacnngaaggactnnggagaatcnntttttttttttttttttttttttttttttt

SEQ ID NO: 2874 - DNA, 84 bp, synthetic construct
  source 1..84: mol_type = other DNA
tttttttaagcagtggtatcaacgcagagtacnngaaggactnngccaagaanntttttttttttttttttttttttttttttt

SEQ ID NO: 2875 - DNA, 84 bp, synthetic construct
  source 1..84: mol_type = other DNA
tttttttaagcagtggtatcaacgcagagtacnngaaggactnnaaggcaagnntttttttttttttttttttttttttttttt

SEQ ID NO: 2876 - DNA, 84 bp, synthetic construct
  source 1..84: mol_type = other DNA
tttttttaagcagtggtatcaacgcagagtacnngaaggactnnaatgtcgcnntttttttttttttttttttttttttttttt

SEQ ID NO: 2877 - DNA, 84 bp, synthetic construct
  source 1..84: mol_type = other DNA
tttttttaagcagtggtatcaacgcagagtacnngaaggactnnatggaaccnntttttttttttttttttttttttttttttt

SEQ ID NO: 2878 - DNA, 84 bp, synthetic construct
  source 1..84: mol_type = other DNA
tttttttaagcagtggtatcaacgcagagtacnngaaggactnnagaggcatnntttttttttttttttttttttttttttttt

SEQ ID NO: 2879 - DNA, 84 bp, synthetic construct
  source 1..84: mol_type = other DNA
tttttttaagcagtggtatcaacgcagagtacnngaaggactnntgcatagcnntttttttttttttttttttttttttttttt

SEQ ID NO: 2880 - DNA, 84 bp, synthetic construct
  source 1..84: mol_type = other DNA
tttttttaagcagtggtatcaacgcagagtacnngaaggactnnctaacgganntttttttttttttttttttttttttttttt

SEQ ID NO: 2881 - DNA, 84 bp, synthetic construct
  source 1..84: mol_type = other DNA
tttttttaagcagtggtatcaacgcagagtacnngaaggactnntatcgaggnntttttttttttttttttttttttttttttt

SEQ ID NO: 2882 - DNA, 84 bp, synthetic construct
  source 1..84: mol_type = other DNA
tttttttaagcagtggtatcaacgcagagtacnngaaggactnncatagcctnntttttttttttttttttttttttttttttt

SEQ ID NO: 2883 - DNA, 84 bp, synthetic construct
  source 1..84: mol_type = other DNA
tttttttaagcagtggtatcaacgcagagtacnngaaggactnnatcgagacnntttttttttttttttttttttttttttttt

SEQ ID NO: 2884 - DNA, 84 bp, synthetic construct
  source 1..84: mol_type = other DNA
tttttttaagcagtggtatcaacgcagagtacnngaaggactnnggaagagtnntttttttttttttttttttttttttttttt

SEQ ID NO: 2885 - DNA, 84 bp, synthetic construct
  source 1..84: mol_type = other DNA
tttttttaagcagtggtatcaacgcagagtacnngaaggactnnccaagtagnntttttttttttttttttttttttttttttt

SEQ ID NO: 2886 - DNA, 84 bp, synthetic construct
  source 1..84: mol_type = other DNA
tttttttaagcagtggtatcaacgcagagtacnngaaggactnnctgaacagnntttttttttttttttttttttttttttttt

SEQ ID NO: 2887 - DNA, 84 bp, synthetic construct
  source 1..84: mol_type = other DNA
tttttttaagcagtggtatcaacgcagagtacnngaaggactnngtaggttcnntttttttttttttttttttttttttttttt

SEQ ID NO: 2888 - DNA, 84 bp, synthetic construct
  source 1..84: mol_type = other DNA
tttttttaagcagtggtatcaacgcagagtacnngaaggactnngtatggacnntttttttttttttttttttttttttttttt

SEQ ID NO: 2889 - DNA, 84 bp, synthetic construct
  source 1..84: mol_type = other DNA
tttttttaagcagtggtatcaacgcagagtacnngaaggactnntcgcaacanntttttttttttttttttttttttttttttt

SEQ ID NO: 2890 - DNA, 84 bp, synthetic construct
  source 1..84: mol_type = other DNA
tttttttaagcagtggtatcaacgcagagtacnngaaggactnnccgctaatnntttttttttttttttttttttttttttttt

SEQ ID NO: 2891 - DNA, 84 bp, synthetic construct
  source 1..84: mol_type = other DNA
tttttttaagcagtggtatcaacgcagagtacnngaaggactnngattcgcanntttttttttttttttttttttttttttttt

SEQ ID NO: 2892 - DNA, 84 bp, synthetic construct
  source 1..84: mol_type = other DNA
tttttttaagcagtggtatcaacgcagagtacnngaaggactnncgatggaanntttttttttttttttttttttttttttttt

SEQ ID NO: 2893 - DNA, 84 bp, synthetic construct
  source 1..84: mol_type = other DNA
tttttttaagcagtggtatcaacgcagagtacnngaaggactnnagcaagganntttttttttttttttttttttttttttttt

SEQ ID NO: 2894 - DNA, 84 bp, synthetic construct
  source 1..84: mol_type = other DNA
tttttttaagcagtggtatcaacgcagagtacnngaaggactnncgtagcaanntttttttttttttttttttttttttttttt

SEQ ID NO: 2895 - DNA, 84 bp, synthetic construct
  source 1..84: mol_type = other DNA
tttttttaagcagtggtatcaacgcagagtacnngaaggactnntggcagtanntttttttttttttttttttttttttttttt

SEQ ID NO: 2896 - DNA, 84 bp, synthetic construct
  source 1..84: mol_type = other DNA
tttttttaagcagtggtatcaacgcagagtacnngaaggactnncggtagttnntttttttttttttttttttttttttttttt

SEQ ID NO: 2897 - DNA, 84 bp, synthetic construct
  source 1..84: mol_type = other DNA
tttttttaagcagtggtatcaacgcagagtacnngaaggactnntgacttcgnntttttttttttttttttttttttttttttt

SEQ ID NO: 2898 - DNA, 84 bp, synthetic construct
  source 1..84: mol_type = other DNA
tttttttaagcagtggtatcaacgcagagtacnngaaggactnngagtgcaanntttttttttttttttttttttttttttttt

SEQ ID NO: 2899 - DNA, 84 bp, synthetic construct
  source 1..84: mol_type = other DNA
tttttttaagcagtggtatcaacgcagagtacnngaaggactnnacggtaacnntttttttttttttttttttttttttttttt

SEQ ID NO: 2900 - DNA, 84 bp, synthetic construct
  source 1..84: mol_type = other DNA
tttttttaagcagtggtatcaacgcagagtacnngaaggactnnaagtggtgnntttttttttttttttttttttttttttttt

SEQ ID NO: 2901 - DNA, 84 bp, synthetic construct
  source 1..84: mol_type = other DNA
tttttttaagcagtggtatcaacgcagagtacnngaaggactnnggagacaanntttttttttttttttttttttttttttttt

SEQ ID NO: 2902 - DNA, 84 bp, synthetic construct
  source 1..84: mol_type = other DNA
tttttttaagcagtggtatcaacgcagagtacnngaaggactnntcaaggacnntttttttttttttttttttttttttttttt

SEQ ID NO: 2903 - DNA, 84 bp, synthetic construct
  source 1..84: mol_type = other DNA
tttttttaagcagtggtatcaacgcagagtacnngaaggactnnaagagagcnntttttttttttttttttttttttttttttt

SEQ ID NO: 2904 - DNA, 84 bp, synthetic construct
  source 1..84: mol_type = other DNA
tttttttaagcagtggtatcaacgcagagtacnngaaggactnncgagagatnntttttttttttttttttttttttttttttt

SEQ ID NO: 2905 - DNA, 84 bp, synthetic construct
  source 1..84: mol_type = other DNA
tttttttaagcagtggtatcaacgcagagtacnngaaggactnnacagatggnntttttttttttttttttttttttttttttt

SEQ ID NO: 2906 - DNA, 84 bp, synthetic construct
  source 1..84: mol_type = other DNA
tttttttaagcagtggtatcaacgcagagtacnngaaggactnnaggagtcanntttttttttttttttttttttttttttttt

SEQ ID NO: 2907 - DNA, 84 bp, synthetic construct
  source 1..84: mol_type = other DNA
tttttttaagcagtggtatcaacgcagagtacnngaaggactnncgtgttacnntttttttttttttttttttttttttttttt

SEQ ID NO: 2908 - DNA, 84 bp, synthetic construct
  source 1..84: mol_type = other DNA
tttttttaagcagtggtatcaacgcagagtacnngaaggactnntagtgtgcnntttttttttttttttttttttttttttttt

SEQ ID NO: 2909 - DNA, 84 bp, synthetic construct
  source 1..84: mol_type = other DNA
tttttttaagcagtggtatcaacgcagagtacnngaaggactnnctcatgacnntttttttttttttttttttttttttttttt

SEQ ID NO: 2910 - DNA, 84 bp, synthetic construct
  source 1..84: mol_type = other DNA
tttttttaagcagtggtatcaacgcagagtacnngaaggactnngtatccagnntttttttttttttttttttttttttttttt

SEQ ID NO: 2911 - DNA, 84 bp, synthetic construct
  source 1..84: mol_type = other DNA
tttttttaagcagtggtatcaacgcagagtacnngaaggactnnacgcctatnntttttttttttttttttttttttttttttt

SEQ ID NO: 2912 - DNA, 84 bp, synthetic construct
  source 1..84: mol_type = other DNA
tttttttaagcagtggtatcaacgcagagtacnngaaggactnnaacgacctnntttttttttttttttttttttttttttttt

SEQ ID NO: 2913 - DNA, 84 bp, synthetic construct
  source 1..84: mol_type = other DNA
tttttttaagcagtggtatcaacgcagagtacnngaaggactnnatcaggctnntttttttttttttttttttttttttttttt

SEQ ID NO: 2914 - DNA, 84 bp, synthetic construct
  source 1..84: mol_type = other DNA
tttttttaagcagtggtatcaacgcagagtacnngaaggactnncaagttcgnntttttttttttttttttttttttttttttt

SEQ ID NO: 2915 - DNA, 84 bp, synthetic construct
  source 1..84: mol_type = other DNA
tttttttaagcagtggtatcaacgcagagtacnngaaggactnntagccaganntttttttttttttttttttttttttttttt

SEQ ID NO: 2916 - DNA, 84 bp, synthetic construct
  source 1..84: mol_type = other DNA
tttttttaagcagtggtatcaacgcagagtacnngaaggactnncaatcacgnntttttttttttttttttttttttttttttt

SEQ ID NO: 2917 - DNA, 84 bp, synthetic construct
  source 1..84: mol_type = other DNA
tttttttaagcagtggtatcaacgcagagtacnngaaggactnngcaacaagnntttttttttttttttttttttttttttttt

SEQ ID NO: 2918 - DNA, 84 bp, synthetic construct
  source 1..84: mol_type = other DNA
tttttttaagcagtggtatcaacgcagagtacnngaaggactnncacgacaanntttttttttttttttttttttttttttttt

SEQ ID NO: 2919 - DNA, 84 bp, synthetic construct
  source 1..84: mol_type = other DNA
tttttttaagcagtggtatcaacgcagagtacnngaaggactnntacggaganntttttttttttttttttttttttttttttt

SEQ ID NO: 2920 - DNA, 84 bp, synthetic construct
  source 1..84: mol_type = other DNA
tttttttaagcagtggtatcaacgcagagtacnngaaggactnncgacaaganntttttttttttttttttttttttttttttt

SEQ ID NO: 2921 - DNA, 84 bp, synthetic construct
  source 1..84: mol_type = other DNA
tttttttaagcagtggtatcaacgcagagtacnngaaggactnncgaagtganntttttttttttttttttttttttttttttt

SEQ ID NO: 2922 - DNA, 84 bp, synthetic construct
  source 1..84: mol_type = other DNA
tttttttaagcagtggtatcaacgcagagtacnngaaggactnnagctggtanntttttttttttttttttttttttttttttt

SEQ ID NO: 2923 - DNA, 84 bp, synthetic construct
  source 1..84: mol_type = other DNA
tttttttaagcagtggtatcaacgcagagtacnngaaggactnnaactaggcnntttttttttttttttttttttttttttttt

SEQ ID NO: 2924 - DNA, 84 bp, synthetic construct
  source 1..84: mol_type = other DNA
tttttttaagcagtggtatcaacgcagagtacnngaaggactnncagcaagtnntttttttttttttttttttttttttttttt

SEQ ID NO: 2925 - DNA, 84 bp, synthetic construct
  source 1..84: mol_type = other DNA
tttttttaagcagtggtatcaacgcagagtacnngaaggactnnacgaggtanntttttttttttttttttttttttttttttt

SEQ ID NO: 2926 - DNA, 84 bp, synthetic construct
  source 1..84: mol_type = other DNA
tttttttaagcagtggtatcaacgcagagtacnngaaggactnncatcttccnntttttttttttttttttttttttttttttt

SEQ ID NO: 2927 - DNA, 84 bp, synthetic construct
  source 1..84: mol_type = other DNA
tttttttaagcagtggtatcaacgcagagtacnngaaggactnncctgaatcnntttttttttttttttttttttttttttttt

SEQ ID NO: 2928 - DNA, 84 bp, synthetic construct
  source 1..84: mol_type = other DNA
tttttttaagcagtggtatcaacgcagagtacnngaaggactnntgcagactnntttttttttttttttttttttttttttttt

SEQ ID NO: 2929 - DNA, 84 bp, synthetic construct
  source 1..84: mol_type = other DNA
tttttttaagcagtggtatcaacgcagagtacnngaaggactnnagatgtggnntttttttttttttttttttttttttttttt

SEQ ID NO: 2930 - DNA, 84 bp, synthetic construct
  source 1..84: mol_type = other DNA
tttttttaagcagtggtatcaacgcagagtacnngaaggactnnagttcgacnntttttttttttttttttttttttttttttt

SEQ ID NO: 2931 - DNA, 84 bp, synthetic construct
  source 1..84: mol_type = other DNA
tttttttaagcagtggtatcaacgcagagtacnngaaggactnnacaacctcnntttttttttttttttttttttttttttttt

SEQ ID NO: 2932 - DNA, 84 bp, synthetic construct
  source 1..84: mol_type = other DNA
tttttttaagcagtggtatcaacgcagagtacnngaaggactnncatggtagnntttttttttttttttttttttttttttttt

SEQ ID NO: 2933 - DNA, 84 bp, synthetic construct
  source 1..84: mol_type = other DNA
tttttttaagcagtggtatcaacgcagagtacnngaaggactnncgtatctcnntttttttttttttttttttttttttttttt

SEQ ID NO: 2934 - DNA, 84 bp, synthetic construct
  source 1..84: mol_type = other DNA
tttttttaagcagtggtatcaacgcagagtacnngaaggactnncctagttcnntttttttttttttttttttttttttttttt

SEQ ID NO: 2935 - DNA, 84 bp, synthetic construct
  source 1..84: mol_type = other DNA
tttttttaagcagtggtatcaacgcagagtacnngaaggactnncaagagtcnntttttttttttttttttttttttttttttt

SEQ ID NO: 2936 - DNA, 84 bp, synthetic construct
  source 1..84: mol_type = other DNA
tttttttaagcagtggtatcaacgcagagtacnngtagacctnnaatcggcanntttttttttttttttttttttttttttttt

SEQ ID NO: 2937 - DNA, 84 bp, synthetic construct
  source 1..84: mol_type = other DNA
tttttttaagcagtggtatcaacgcagagtacnngtagacctnntacggcatnntttttttttttttttttttttttttttttt

SEQ ID NO: 2938 - DNA, 84 bp, synthetic construct
  source 1..84: mol_type = other DNA
tttttttaagcagtggtatcaacgcagagtacnngtagacctnnttggatcgnntttttttttttttttttttttttttttttt

SEQ ID NO: 2939 - DNA, 84 bp, synthetic construct
  source 1..84: mol_type = other DNA
tttttttaagcagtggtatcaacgcagagtacnngtagacctnntggaacganntttttttttttttttttttttttttttttt

SEQ ID NO: 2940 - DNA, 84 bp, synthetic construct
  source 1..84: mol_type = other DNA
tttttttaagcagtggtatcaacgcagagtacnngtagacctnnggcaatcanntttttttttttttttttttttttttttttt

SEQ ID NO: 2941 - DNA, 84 bp, synthetic construct
  source 1..84: mol_type = other DNA
tttttttaagcagtggtatcaacgcagagtacnngtagacctnngaatccganntttttttttttttttttttttttttttttt

SEQ ID NO: 2942 - DNA, 84 bp, synthetic construct
  source 1..84: mol_type = other DNA
tttttttaagcagtggtatcaacgcagagtacnngtagacctnnttacggtgnntttttttttttttttttttttttttttttt

SEQ ID NO: 2943 - DNA, 84 bp, synthetic construct
  source 1..84: mol_type = other DNA
tttttttaagcagtggtatcaacgcagagtacnngtagacctnncatatcggnntttttttttttttttttttttttttttttt

SEQ ID NO: 2944 - DNA, 84 bp, synthetic construct
  source 1..84: mol_type = other DNA
tttttttaagcagtggtatcaacgcagagtacnngtagacctnncttcggtanntttttttttttttttttttttttttttttt

SEQ ID NO: 2945 - DNA, 84 bp, synthetic construct
  source 1..84: mol_type = other DNA
tttttttaagcagtggtatcaacgcagagtacnngtagacctnntcctaacgnntttttttttttttttttttttttttttttt

SEQ ID NO: 2946 - DNA, 84 bp, synthetic construct
  source 1..84: mol_type = other DNA
tttttttaagcagtggtatcaacgcagagtacnngtagacctnngtaagccanntttttttttttttttttttttttttttttt

SEQ ID NO: 2947 - DNA, 84 bp, synthetic construct
  source 1..84: mol_type = other DNA
tttttttaagcagtggtatcaacgcagagtacnngtagacctnntaaggtggnntttttttttttttttttttttttttttttt

SEQ ID NO: 2948 - DNA, 84 bp, synthetic construct
  source 1..84: mol_type = other DNA
tttttttaagcagtggtatcaacgcagagtacnngtagacctnnggtaagctnntttttttttttttttttttttttttttttt

SEQ ID NO: 2949 - DNA, 84 bp, synthetic construct
  source 1..84: mol_type = other DNA
tttttttaagcagtggtatcaacgcagagtacnngtagacctnntgtgtcganntttttttttttttttttttttttttttttt

SEQ ID NO: 2950 - DNA, 84 bp, synthetic construct
  source 1..84: mol_type = other DNA
tttttttaagcagtggtatcaacgcagagtacnngtagacctnngagcatganntttttttttttttttttttttttttttttt

SEQ ID NO: 2951 - DNA, 84 bp, synthetic construct
  source 1..84: mol_type = other DNA
tttttttaagcagtggtatcaacgcagagtacnngtagacctnntcgaagtcnntttttttttttttttttttttttttttttt

SEQ ID NO: 2952 - DNA, 84 bp, synthetic construct
  source 1..84: mol_type = other DNA
tttttttaagcagtggtatcaacgcagagtacnngtagacctnnggtgaacanntttttttttttttttttttttttttttttt

SEQ ID NO: 2953 - DNA, 84 bp, synthetic construct
  source 1..84: mol_type = other DNA
tttttttaagcagtggtatcaacgcagagtacnngtagacctnnacatgcacnntttttttttttttttttttttttttttttt

SEQ ID NO: 2954 - DNA, 84 bp, synthetic construct
  source 1..84: mol_type = other DNA
tttttttaagcagtggtatcaacgcagagtacnngtagacctnnccaacagtnntttttttttttttttttttttttttttttt

SEQ ID NO: 2955 - DNA, 84 bp, synthetic construct
  source 1..84: mol_type = other DNA
tttttttaagcagtggtatcaacgcagagtacnngtagacctnnagaacagcnntttttttttttttttttttttttttttttt

SEQ ID NO: 2956 - DNA, 84 bp, synthetic construct
  source 1..84: mol_type = other DNA
tttttttaagcagtggtatcaacgcagagtacnngtagacctnngaacacgtnntttttttttttttttttttttttttttttt

SEQ ID NO: 2957 - DNA, 84 bp, synthetic construct
  source 1..84: mol_type = other DNA
tttttttaagcagtggtatcaacgcagagtacnngtagacctnnggtcttcanntttttttttttttttttttttttttttttt

SEQ ID NO: 2958 - DNA, 84 bp, synthetic construct
  source 1..84: mol_type = other DNA
tttttttaagcagtggtatcaacgcagagtacnngtagacctnnaggttcagnntttttttttttttttttttttttttttttt

SEQ ID NO: 2959 - DNA, 84 bp, synthetic construct
  source 1..84: mol_type = other DNA
tttttttaagcagtggtatcaacgcagagtacnngtagacctnnctagagcanntttttttttttttttttttttttttttttt

SEQ ID NO: 2960 - DNA, 84 bp, synthetic construct
  source 1..84: mol_type = other DNA
tttttttaagcagtggtatcaacgcagagtacnngtagacctnncttctagcnntttttttttttttttttttttttttttttt

SEQ ID NO: 2961 - DNA, 84 bp, synthetic construct
  source 1..84: mol_type = other DNA
tttttttaagcagtggtatcaacgcagagtacnngtagacctnngagtaacgnntttttttttttttttttttttttttttttt

SEQ ID NO: 2962 - DNA, 84 bp, synthetic construct
  source 1..84: mol_type = other DNA
tttttttaagcagtggtatcaacgcagagtacnngtagacctnnctaagaggnntttttttttttttttttttttttttttttt

SEQ ID NO: 2963 - DNA, 84 bp, synthetic construct
  source 1..84: mol_type = other DNA
tttttttaagcagtggtatcaacgcagagtacnngtagacctnnacgtgtagnntttttttttttttttttttttttttttttt

SEQ ID NO: 2964 - DNA, 84 bp, synthetic construct
  source 1..84: mol_type = other DNA
tttttttaagcagtggtatcaacgcagagtacnngtagacctnnactacaggnntttttttttttttttttttttttttttttt

SEQ ID NO: 2965 - DNA, 84 bp, synthetic construct
  source 1..84: mol_type = other DNA
tttttttaagcagtggtatcaacgcagagtacnngtagacctnntacaggtcnntttttttttttttttttttttttttttttt

SEQ ID NO: 2966 - DNA, 84 bp, synthetic construct
  source 1..84: mol_type = other DNA
tttttttaagcagtggtatcaacgcagagtacnngtagacctnnctcacatgnntttttttttttttttttttttttttttttt

SEQ ID NO: 2967 - DNA, 84 bp, synthetic construct
  source 1..84: mol_type = other DNA
tttttttaagcagtggtatcaacgcagagtacnngtagacctnnactaggagnntttttttttttttttttttttttttttttt

SEQ ID NO: 2968 - DNA, 84 bp, synthetic construct
  source 1..84: mol_type = other DNA
tttttttaagcagtggtatcaacgcagagtacnngtagacctnnccatagganntttttttttttttttttttttttttttttt

SEQ ID NO: 2969 - DNA, 84 bp, synthetic construct
  source 1..84: mol_type = other DNA
tttttttaagcagtggtatcaacgcagagtacnngtagacctnnggagaatcnntttttttttttttttttttttttttttttt

SEQ ID NO: 2970 - DNA, 84 bp, synthetic construct
  source 1..84: mol_type = other DNA
tttttttaagcagtggtatcaacgcagagtacnngtagacctnngccaagaanntttttttttttttttttttttttttttttt

SEQ ID NO: 2971 - DNA, 84 bp, synthetic construct
  source 1..84: mol_type = other DNA
tttttttaagcagtggtatcaacgcagagtacnngtagacctnnaaggcaagnntttttttttttttttttttttttttttttt

SEQ ID NO: 2972 - DNA, 84 bp, synthetic construct
  source 1..84: mol_type = other DNA
tttttttaagcagtggtatcaacgcagagtacnngtagacctnnaatgtcgcnntttttttttttttttttttttttttttttt

SEQ ID NO: 2973 - DNA, 84 bp, synthetic construct
  source 1..84: mol_type = other DNA
tttttttaagcagtggtatcaacgcagagtacnngtagacctnnatggaaccnntttttttttttttttttttttttttttttt

SEQ ID NO: 2974 - DNA, 84 bp, synthetic construct
  source 1..84: mol_type = other DNA
tttttttaagcagtggtatcaacgcagagtacnngtagacctnnagaggcatnntttttttttttttttttttttttttttttt

SEQ ID NO: 2975 - DNA, 84 bp, synthetic construct
  source 1..84: mol_type = other DNA
tttttttaagcagtggtatcaacgcagagtacnngtagacctnntgcatagcnntttttttttttttttttttttttttttttt

SEQ ID NO: 2976 - DNA, 84 bp, synthetic construct
  source 1..84: mol_type = other DNA
tttttttaagcagtggtatcaacgcagagtacnngtagacctnnctaacgganntttttttttttttttttttttttttttttt

SEQ ID NO: 2977 - DNA, 84 bp, synthetic construct
  source 1..84: mol_type = other DNA
tttttttaagcagtggtatcaacgcagagtacnngtagacctnntatcgaggnntttttttttttttttttttttttttttttt

SEQ ID NO: 2978 - DNA, 84 bp, synthetic construct
  source 1..84: mol_type = other DNA
tttttttaagcagtggtatcaacgcagagtacnngtagacctnncatagcctnntttttttttttttttttttttttttttttt

SEQ ID NO: 2979 - DNA, 84 bp, synthetic construct
  source 1..84: mol_type = other DNA
tttttttaagcagtggtatcaacgcagagtacnngtagacctnnatcgagacnntttttttttttttttttttttttttttttt

SEQ ID NO: 2980 - DNA, 84 bp, synthetic construct
  source 1..84: mol_type = other DNA
tttttttaagcagtggtatcaacgcagagtacnngtagacctnnggaagagtnntttttttttttttttttttttttttttttt

SEQ ID NO: 2981 - DNA, 84 bp, synthetic construct
  source 1..84: mol_type = other DNA
tttttttaagcagtggtatcaacgcagagtacnngtagacctnnccaagtagnntttttttttttttttttttttttttttttt

SEQ ID NO: 2982 - DNA, 84 bp, synthetic construct
  source 1..84: mol_type = other DNA
tttttttaagcagtggtatcaacgcagagtacnngtagacctnnctgaacagnntttttttttttttttttttttttttttttt

SEQ ID NO: 2983 - DNA, 84 bp, synthetic construct
  source 1..84: mol_type = other DNA
tttttttaagcagtggtatcaacgcagagtacnngtagacctnngtaggttcnntttttttttttttttttttttttttttttt

SEQ ID NO: 2984 - DNA, 84 bp, synthetic construct
  source 1..84: mol_type = other DNA
tttttttaagcagtggtatcaacgcagagtacnngtagacctnngtatggacnntttttttttttttttttttttttttttttt

SEQ ID NO: 2985 - DNA, 84 bp, synthetic construct
  source 1..84: mol_type = other DNA
tttttttaagcagtggtatcaacgcagagtacnngtagacctnntcgcaacanntttttttttttttttttttttttttttttt

SEQ ID NO: 2986 - DNA, 84 bp, synthetic construct
  source 1..84: mol_type = other DNA
tttttttaagcagtggtatcaacgcagagtacnngtagacctnnccgctaatnntttttttttttttttttttttttttttttt

SEQ ID NO: 2987 - DNA, 84 bp, synthetic construct
  source 1..84: mol_type = other DNA
tttttttaagcagtggtatcaacgcagagtacnngtagacctnngattcgcanntttttttttttttttttttttttttttttt

SEQ ID NO: 2988 - DNA, 84 bp, synthetic construct
  source 1..84: mol_type = other DNA
tttttttaagcagtggtatcaacgcagagtacnngtagacctnncgatggaanntttttttttttttttttttttttttttttt

SEQ ID NO: 2989 - DNA, 84 bp, synthetic construct
  source 1..84: mol_type = other DNA
tttttttaagcagtggtatcaacgcagagtacnngtagacctnnagcaagganntttttttttttttttttttttttttttttt

SEQ ID NO: 2990 - DNA, 84 bp, synthetic construct
  source 1..84: mol_type = other DNA
tttttttaagcagtggtatcaacgcagagtacnngtagacctnncgtagcaanntttttttttttttttttttttttttttttt

SEQ ID NO: 2991 - DNA, 84 bp, synthetic construct
  source 1..84: mol_type = other DNA
tttttttaagcagtggtatcaacgcagagtacnngtagacctnntggcagtanntttttttttttttttttttttttttttttt

SEQ ID NO: 2992 - DNA, 84 bp, synthetic construct
  source 1..84: mol_type = other DNA
tttttttaagcagtggtatcaacgcagagtacnngtagacctnncggtagttnntttttttttttttttttttttttttttttt

SEQ ID NO: 2993 - DNA, 84 bp, synthetic construct
  source 1..84: mol_type = other DNA
tttttttaagcagtggtatcaacgcagagtacnngtagacctnntgacttcgnntttttttttttttttttttttttttttttt

SEQ ID NO: 2994 - DNA, 84 bp, synthetic construct
  source 1..84: mol_type = other DNA
tttttttaagcagtggtatcaacgcagagtacnngtagacctnngagtgcaanntttttttttttttttttttttttttttttt

SEQ ID NO: 2995 - DNA, 84 bp, synthetic construct
  source 1..84: mol_type = other DNA
tttttttaagcagtggtatcaacgcagagtacnngtagacctnnacggtaacnntttttttttttttttttttttttttttttt

SEQ ID NO: 2996 - DNA, 84 bp, synthetic construct
  source 1..84: mol_type = other DNA
tttttttaagcagtggtatcaacgcagagtacnngtagacctnnaagtggtgnntttttttttttttttttttttttttttttt

SEQ ID NO: 2997 - DNA, 84 bp, synthetic construct
  source 1..84: mol_type = other DNA
tttttttaagcagtggtatcaacgcagagtacnngtagacctnnggagacaanntttttttttttttttttttttttttttttt

SEQ ID NO: 2998 - DNA, 84 bp, synthetic construct
  source 1..84: mol_type = other DNA
tttttttaagcagtggtatcaacgcagagtacnngtagacctnntcaaggacnntttttttttttttttttttttttttttttt

SEQ ID NO: 2999 - DNA, 84 bp, synthetic construct
  source 1..84: mol_type = other DNA
tttttttaagcagtggtatcaacgcagagtacnngtagacctnnaagagagcnntttttttttttttttttttttttttttttt

SEQ ID NO: 3000 - DNA, 84 bp, synthetic construct
  source 1..84: mol_type = other DNA
tttttttaagcagtggtatcaacgcagagtacnngtagacctnncgagagatnntttttttttttttttttttttttttttttt

SEQ ID NO: 3001 - DNA, 84 bp, synthetic construct
  source 1..84: mol_type = other DNA
tttttttaagcagtggtatcaacgcagagtacnngtagacctnnacagatggnntttttttttttttttttttttttttttttt

SEQ ID NO: 3002 - DNA, 84 bp, synthetic construct
  source 1..84: mol_type = other DNA
tttttttaagcagtggtatcaacgcagagtacnngtagacctnnaggagtcanntttttttttttttttttttttttttttttt

SEQ ID NO: 3003 - DNA, 84 bp, synthetic construct
  source 1..84: mol_type = other DNA
tttttttaagcagtggtatcaacgcagagtacnngtagacctnncgtgttacnntttttttttttttttttttttttttttttt

SEQ ID NO: 3004 - DNA, 84 bp, synthetic construct
  source 1..84: mol_type = other DNA
tttttttaagcagtggtatcaacgcagagtacnngtagacctnntagtgtgcnntttttttttttttttttttttttttttttt

SEQ ID NO: 3005 - DNA, 84 bp, synthetic construct
  source 1..84: mol_type = other DNA
tttttttaagcagtggtatcaacgcagagtacnngtagacctnnctcatgacnntttttttttttttttttttttttttttttt

SEQ ID NO: 3006 - DNA, 84 bp, synthetic construct
  source 1..84: mol_type = other DNA
tttttttaagcagtggtatcaacgcagagtacnngtagacctnngtatccagnntttttttttttttttttttttttttttttt

SEQ ID NO: 3007 - DNA, 84 bp, synthetic construct
  source 1..84: mol_type = other DNA
tttttttaagcagtggtatcaacgcagagtacnngtagacctnnacgcctatnntttttttttttttttttttttttttttttt

SEQ ID NO: 3008 - DNA, 84 bp, synthetic construct
  source 1..84: mol_type = other DNA
tttttttaagcagtggtatcaacgcagagtacnngtagacctnnaacgacctnntttttttttttttttttttttttttttttt

SEQ ID NO: 3009 - DNA, 84 bp, synthetic construct
  source 1..84: mol_type = other DNA
tttttttaagcagtggtatcaacgcagagtacnngtagacctnnatcaggctnntttttttttttttttttttttttttttttt

SEQ ID NO: 3010 - DNA, 84 bp, synthetic construct
  source 1..84: mol_type = other DNA
tttttttaagcagtggtatcaacgcagagtacnngtagacctnncaagttcgnntttttttttttttttttttttttttttttt

SEQ ID NO: 3011 - DNA, 84 bp, synthetic construct
  source 1..84: mol_type = other DNA
tttttttaagcagtggtatcaacgcagagtacnngtagacctnntagccaganntttttttttttttttttttttttttttttt

SEQ ID NO: 3012 - DNA, 84 bp, synthetic construct
  source 1..84: mol_type = other DNA
tttttttaagcagtggtatcaacgcagagtacnngtagacctnncaatcacgnntttttttttttttttttttttttttttttt

SEQ ID NO: 3013 - DNA, 84 bp, synthetic construct
  source 1..84: mol_type = other DNA
tttttttaagcagtggtatcaacgcagagtacnngtagacctnngcaacaagnntttttttttttttttttttttttttttttt

SEQ ID NO: 3014 - DNA, 84 bp, synthetic construct
  source 1..84: mol_type = other DNA
tttttttaagcagtggtatcaacgcagagtacnngtagacctnncacgacaanntttttttttttttttttttttttttttttt

SEQ ID NO: 3015 - DNA, 84 bp, synthetic construct
  source 1..84: mol_type = other DNA
tttttttaagcagtggtatcaacgcagagtacnngtagacctnntacggaganntttttttttttttttttttttttttttttt

SEQ ID NO: 3016 - DNA, 84 bp, synthetic construct
  source 1..84: mol_type = other DNA
tttttttaagcagtggtatcaacgcagagtacnngtagacctnncgacaaganntttttttttttttttttttttttttttttt

SEQ ID NO: 3017 - DNA, 84 bp, synthetic construct
  source 1..84: mol_type = other DNA
tttttttaagcagtggtatcaacgcagagtacnngtagacctnncgaagtganntttttttttttttttttttttttttttttt

SEQ ID NO: 3018 - DNA, 84 bp, synthetic construct
  source 1..84: mol_type = other DNA
tttttttaagcagtggtatcaacgcagagtacnngtagacctnnagctggtanntttttttttttttttttttttttttttttt

SEQ ID NO: 3019 - DNA, 84 bp, synthetic construct
  source 1..84: mol_type = other DNA
tttttttaagcagtggtatcaacgcagagtacnngtagacctnnaactaggcnntttttttttttttttttttttttttttttt

SEQ ID NO: 3020 - DNA, 84 bp, synthetic construct
  source 1..84: mol_type = other DNA
tttttttaagcagtggtatcaacgcagagtacnngtagacctnncagcaagtnntttttttttttttttttttttttttttttt

SEQ ID NO: 3021 - DNA, 84 bp, synthetic construct
  source 1..84: mol_type = other DNA
tttttttaagcagtggtatcaacgcagagtacnngtagacctnnacgaggtanntttttttttttttttttttttttttttttt

SEQ ID NO: 3022 - DNA, 84 bp, synthetic construct
  source 1..84: mol_type = other DNA
tttttttaagcagtggtatcaacgcagagtacnngtagacctnncatcttccnntttttttttttttttttttttttttttttt

SEQ ID NO: 3023 - DNA, 84 bp, synthetic construct
  source 1..84: mol_type = other DNA
tttttttaagcagtggtatcaacgcagagtacnngtagacctnncctgaatcnntttttttttttttttttttttttttttttt

SEQ ID NO: 3024 - DNA, 84 bp, synthetic construct
  source 1..84: mol_type = other DNA
tttttttaagcagtggtatcaacgcagagtacnngtagacctnntgcagactnntttttttttttttttttttttttttttttt

SEQ ID NO: 3025 - DNA, 84 bp, synthetic construct
  source 1..84: mol_type = other DNA
tttttttaagcagtggtatcaacgcagagtacnngtagacctnnagatgtggnntttttttttttttttttttttttttttttt

SEQ ID NO: 3026 - DNA, 84 bp, synthetic construct
  source 1..84: mol_type = other DNA
tttttttaagcagtggtatcaacgcagagtacnngtagacctnnagttcgacnntttttttttttttttttttttttttttttt

SEQ ID NO: 3027 - DNA, 84 bp, synthetic construct
  source 1..84: mol_type = other DNA
tttttttaagcagtggtatcaacgcagagtacnngtagacctnnacaacctcnntttttttttttttttttttttttttttttt

SEQ ID NO: 3028 - DNA, 84 bp, synthetic construct
  source 1..84: mol_type = other DNA
tttttttaagcagtggtatcaacgcagagtacnngtagacctnncatggtagnntttttttttttttttttttttttttttttt

SEQ ID NO: 3029 - DNA, 84 bp, synthetic construct
  source 1..84: mol_type = other DNA
tttttttaagcagtggtatcaacgcagagtacnngtagacctnncgtatctcnntttttttttttttttttttttttttttttt

SEQ ID NO: 3030 - DNA, 84 bp, synthetic construct
  source 1..84: mol_type = other DNA
tttttttaagcagtggtatcaacgcagagtacnngtagacctnncctagttcnntttttttttttttttttttttttttttttt

SEQ ID NO: 3031 - DNA, 84 bp, synthetic construct
  source 1..84: mol_type = other DNA
tttttttaagcagtggtatcaacgcagagtacnngtagacctnncaagagtcnntttttttttttttttttttttttttttttt

SEQ ID NO: 3032 - DNA, 84 bp, synthetic construct
  source 1..84: mol_type = other DNA
tttttttaagcagtggtatcaacgcagagtacnncaattggcnnaatcggcanntttttttttttttttttttttttttttttt

SEQ ID NO: 3033 - DNA, 84 bp, synthetic construct
  source 1..84: mol_type = other DNA
tttttttaagcagtggtatcaacgcagagtacnncaattggcnntacggcatnntttttttttttttttttttttttttttttt

SEQ ID NO: 3034 - DNA, 84 bp, synthetic construct
  source 1..84: mol_type = other DNA
tttttttaagcagtggtatcaacgcagagtacnncaattggcnnttggatcgnntttttttttttttttttttttttttttttt

SEQ ID NO: 3035 - DNA, 84 bp, synthetic construct
  source 1..84: mol_type = other DNA
tttttttaagcagtggtatcaacgcagagtacnncaattggcnntggaacganntttttttttttttttttttttttttttttt

SEQ ID NO: 3036 - DNA, 84 bp, synthetic construct
  source 1..84: mol_type = other DNA
tttttttaagcagtggtatcaacgcagagtacnncaattggcnnggcaatcanntttttttttttttttttttttttttttttt

SEQ ID NO: 3037 - DNA, 84 bp, synthetic construct
  source 1..84: mol_type = other DNA
tttttttaagcagtggtatcaacgcagagtacnncaattggcnngaatccganntttttttttttttttttttttttttttttt

SEQ ID NO: 3038 - DNA, 84 bp, synthetic construct
  source 1..84: mol_type = other DNA
tttttttaagcagtggtatcaacgcagagtacnncaattggcnnttacggtgnntttttttttttttttttttttttttttttt

SEQ ID NO: 3039 - DNA, 84 bp, synthetic construct
  source 1..84: mol_type = other DNA
tttttttaagcagtggtatcaacgcagagtacnncaattggcnncatatcggnntttttttttttttttttttttttttttttt

SEQ ID NO: 3040 - DNA, 84 bp, synthetic construct
  source 1..84: mol_type = other DNA
tttttttaagcagtggtatcaacgcagagtacnncaattggcnncttcggtanntttttttttttttttttttttttttttttt

SEQ ID NO: 3041 - DNA, 84 bp, synthetic construct
  source 1..84: mol_type = other DNA
tttttttaagcagtggtatcaacgcagagtacnncaattggcnntcctaacgnntttttttttttttttttttttttttttttt

SEQ ID NO: 3042 - DNA, 84 bp, synthetic construct
  source 1..84: mol_type = other DNA
tttttttaagcagtggtatcaacgcagagtacnncaattggcnngtaagccanntttttttttttttttttttttttttttttt

SEQ ID NO: 3043 - DNA, 84 bp, synthetic construct
  source 1..84: mol_type = other DNA
tttttttaagcagtggtatcaacgcagagtacnncaattggcnntaaggtggnntttttttttttttttttttttttttttttt

SEQ ID NO: 3044 - DNA, 84 bp, synthetic construct
  source 1..84: mol_type = other DNA
tttttttaagcagtggtatcaacgcagagtacnncaattggcnnggtaagctnntttttttttttttttttttttttttttttt

SEQ ID NO: 3045 - DNA, 84 bp, synthetic construct
  source 1..84: mol_type = other DNA
tttttttaagcagtggtatcaacgcagagtacnncaattggcnntgtgtcganntttttttttttttttttttttttttttttt

SEQ ID NO: 3046 - DNA, 84 bp, synthetic construct
  source 1..84: mol_type = other DNA
tttttttaagcagtggtatcaacgcagagtacnncaattggcnngagcatganntttttttttttttttttttttttttttttt

SEQ ID NO: 3047 - DNA, 84 bp, synthetic construct
  source 1..84: mol_type = other DNA
tttttttaagcagtggtatcaacgcagagtacnncaattggcnntcgaagtcnntttttttttttttttttttttttttttttt

SEQ ID NO: 3048 - DNA, 84 bp, synthetic construct
  source 1..84: mol_type = other DNA
tttttttaagcagtggtatcaacgcagagtacnncaattggcnnggtgaacanntttttttttttttttttttttttttttttt

SEQ ID NO: 3049 - DNA, 84 bp, synthetic construct
  source 1..84: mol_type = other DNA
tttttttaagcagtggtatcaacgcagagtacnncaattggcnnacatgcacnntttttttttttttttttttttttttttttt

SEQ ID NO: 3050 - DNA, 84 bp, synthetic construct
  source 1..84: mol_type = other DNA
tttttttaagcagtggtatcaacgcagagtacnncaattggcnnccaacagtnntttttttttttttttttttttttttttttt

SEQ ID NO: 3051 - DNA, 84 bp, synthetic construct
  source 1..84: mol_type = other DNA
tttttttaagcagtggtatcaacgcagagtacnncaattggcnnagaacagcnntttttttttttttttttttttttttttttt

SEQ ID NO: 3052 - DNA, 84 bp, synthetic construct
  source 1..84: mol_type = other DNA
tttttttaagcagtggtatcaacgcagagtacnncaattggcnngaacacgtnntttttttttttttttttttttttttttttt

SEQ ID NO: 3053 - DNA, 84 bp, synthetic construct
  source 1..84: mol_type = other DNA
tttttttaagcagtggtatcaacgcagagtacnncaattggcnnggtcttcanntttttttttttttttttttttttttttttt

SEQ ID NO: 3054 - DNA, 84 bp, synthetic construct
  source 1..84: mol_type = other DNA
tttttttaagcagtggtatcaacgcagagtacnncaattggcnnaggttcagnntttttttttttttttttttttttttttttt

SEQ ID NO: 3055 - DNA, 84 bp, synthetic construct
  source 1..84: mol_type = other DNA
tttttttaagcagtggtatcaacgcagagtacnncaattggcnnctagagcanntttttttttttttttttttttttttttttt

SEQ ID NO: 3056 - DNA, 84 bp, synthetic construct
  source 1..84: mol_type = other DNA
tttttttaagcagtggtatcaacgcagagtacnncaattggcnncttctagcnntttttttttttttttttttttttttttttt

SEQ ID NO: 3057 - DNA, 84 bp, synthetic construct
  source 1..84: mol_type = other DNA
tttttttaagcagtggtatcaacgcagagtacnncaattggcnngagtaacgnntttttttttttttttttttttttttttttt

SEQ ID NO: 3058 - DNA, 84 bp, synthetic construct
  source 1..84: mol_type = other DNA
tttttttaagcagtggtatcaacgcagagtacnncaattggcnnctaagaggnntttttttttttttttttttttttttttttt

SEQ ID NO: 3059 - DNA, 84 bp, synthetic construct
  source 1..84: mol_type = other DNA
tttttttaagcagtggtatcaacgcagagtacnncaattggcnnacgtgtagnntttttttttttttttttttttttttttttt

SEQ ID NO: 3060 - DNA, 84 bp, synthetic construct
  source 1..84: mol_type = other DNA
tttttttaagcagtggtatcaacgcagagtacnncaattggcnnactacaggnntttttttttttttttttttttttttttttt

SEQ ID NO: 3061 - DNA, 84 bp, synthetic construct
  source 1..84: mol_type = other DNA
tttttttaagcagtggtatcaacgcagagtacnncaattggcnntacaggtcnntttttttttttttttttttttttttttttt

SEQ ID NO: 3062 - DNA, 84 bp, synthetic construct
  source 1..84: mol_type = other DNA
tttttttaagcagtggtatcaacgcagagtacnncaattggcnnctcacatgnntttttttttttttttttttttttttttttt

SEQ ID NO: 3063 - DNA, 84 bp, synthetic construct
  source 1..84: mol_type = other DNA
tttttttaagcagtggtatcaacgcagagtacnncaattggcnnactaggagnntttttttttttttttttttttttttttttt

SEQ ID NO: 3064 - DNA, 84 bp, synthetic construct
  source 1..84: mol_type = other DNA
tttttttaagcagtggtatcaacgcagagtacnncaattggcnnccatagganntttttttttttttttttttttttttttttt

SEQ ID NO: 3065 - DNA, 84 bp, synthetic construct
  source 1..84: mol_type = other DNA
tttttttaagcagtggtatcaacgcagagtacnncaattggcnnggagaatcnntttttttttttttttttttttttttttttt

SEQ ID NO: 3066 - DNA, 84 bp, synthetic construct
  source 1..84: mol_type = other DNA
tttttttaagcagtggtatcaacgcagagtacnncaattggcnngccaagaanntttttttttttttttttttttttttttttt

SEQ ID NO: 3067 - DNA, 84 bp, synthetic construct
  source 1..84: mol_type = other DNA
tttttttaagcagtggtatcaacgcagagtacnncaattggcnnaaggcaagnntttttttttttttttttttttttttttttt

SEQ ID NO: 3068 - DNA, 84 bp, synthetic construct
  source 1..84: mol_type = other DNA
tttttttaagcagtggtatcaacgcagagtacnncaattggcnnaatgtcgcnntttttttttttttttttttttttttttttt

SEQ ID NO: 3069 - DNA, 84 bp, synthetic construct
  source 1..84: mol_type = other DNA
tttttttaagcagtggtatcaacgcagagtacnncaattggcnnatggaaccnntttttttttttttttttttttttttttttt

SEQ ID NO: 3070 - DNA, 84 bp, synthetic construct
  source 1..84: mol_type = other DNA
tttttttaagcagtggtatcaacgcagagtacnncaattggcnnagaggcatnntttttttttttttttttttttttttttttt

SEQ ID NO: 3071 - DNA, 84 bp, synthetic construct
  source 1..84: mol_type = other DNA
tttttttaagcagtggtatcaacgcagagtacnncaattggcnntgcatagcnntttttttttttttttttttttttttttttt

SEQ ID NO: 3072 - DNA, 84 bp, synthetic construct
  source 1..84: mol_type = other DNA
tttttttaagcagtggtatcaacgcagagtacnncaattggcnnctaacgganntttttttttttttttttttttttttttttt

SEQ ID NO: 3073 - DNA, 84 bp, synthetic construct
  source 1..84: mol_type = other DNA
tttttttaagcagtggtatcaacgcagagtacnncaattggcnntatcgaggnntttttttttttttttttttttttttttttt

SEQ ID NO: 3074 - DNA, 84 bp, synthetic construct
  source 1..84: mol_type = other DNA
tttttttaagcagtggtatcaacgcagagtacnncaattggcnncatagcctnntttttttttttttttttttttttttttttt

SEQ ID NO: 3075 - DNA, 84 bp, synthetic construct
  source 1..84: mol_type = other DNA
tttttttaagcagtggtatcaacgcagagtacnncaattggcnnatcgagacnntttttttttttttttttttttttttttttt

SEQ ID NO: 3076 - DNA, 84 bp, synthetic construct
  source 1..84: mol_type = other DNA
tttttttaagcagtggtatcaacgcagagtacnncaattggcnnggaagagtnntttttttttttttttttttttttttttttt

SEQ ID NO: 3077 - DNA, 84 bp, synthetic construct
  source 1..84: mol_type = other DNA
tttttttaagcagtggtatcaacgcagagtacnncaattggcnnccaagtagnntttttttttttttttttttttttttttttt

SEQ ID NO: 3078 - DNA, 84 bp, synthetic construct
  source 1..84: mol_type = other DNA
tttttttaagcagtggtatcaacgcagagtacnncaattggcnnctgaacagnntttttttttttttttttttttttttttttt

SEQ ID NO: 3079 - DNA, 84 bp, synthetic construct
  source 1..84: mol_type = other DNA
tttttttaagcagtggtatcaacgcagagtacnncaattggcnngtaggttcnntttttttttttttttttttttttttttttt

SEQ ID NO: 3080 - DNA, 84 bp, synthetic construct
  source 1..84: mol_type = other DNA
tttttttaagcagtggtatcaacgcagagtacnncaattggcnngtatggacnntttttttttttttttttttttttttttttt

SEQ ID NO: 3081 - DNA, 84 bp, synthetic construct
  source 1..84: mol_type = other DNA
tttttttaagcagtggtatcaacgcagagtacnncaattggcnntcgcaacanntttttttttttttttttttttttttttttt

SEQ ID NO: 3082 - DNA, 84 bp, synthetic construct
  source 1..84: mol_type = other DNA
tttttttaagcagtggtatcaacgcagagtacnncaattggcnnccgctaatnntttttttttttttttttttttttttttttt

SEQ ID NO: 3083 - DNA, 84 bp, synthetic construct
  source 1..84: mol_type = other DNA
tttttttaagcagtggtatcaacgcagagtacnncaattggcnngattcgcanntttttttttttttttttttttttttttttt

SEQ ID NO: 3084 - DNA, 84 bp, synthetic construct
  source 1..84: mol_type = other DNA
tttttttaagcagtggtatcaacgcagagtacnncaattggcnncgatggaanntttttttttttttttttttttttttttttt

SEQ ID NO: 3085 - DNA, 84 bp, synthetic construct
  source 1..84: mol_type = other DNA
tttttttaagcagtggtatcaacgcagagtacnncaattggcnnagcaagganntttttttttttttttttttttttttttttt

SEQ ID NO: 3086 - DNA, 84 bp, synthetic construct
  source 1..84: mol_type = other DNA
tttttttaagcagtggtatcaacgcagagtacnncaattggcnncgtagcaanntttttttttttttttttttttttttttttt

SEQ ID NO: 3087 - DNA, 84 bp, synthetic construct
  source 1..84: mol_type = other DNA
tttttttaagcagtggtatcaacgcagagtacnncaattggcnntggcagtanntttttttttttttttttttttttttttttt

SEQ ID NO: 3088 - DNA, 84 bp, synthetic construct
  source 1..84: mol_type = other DNA
tttttttaagcagtggtatcaacgcagagtacnncaattggcnncggtagttnntttttttttttttttttttttttttttttt

SEQ ID NO: 3089 - DNA, 84 bp, synthetic construct
  source 1..84: mol_type = other DNA
tttttttaagcagtggtatcaacgcagagtacnncaattggcnntgacttcgnntttttttttttttttttttttttttttttt

SEQ ID NO: 3090 - DNA, 84 bp, synthetic construct
  source 1..84: mol_type = other DNA
tttttttaagcagtggtatcaacgcagagtacnncaattggcnngagtgcaanntttttttttttttttttttttttttttttt

SEQ ID NO: 3091 - DNA, 84 bp, synthetic construct
  source 1..84: mol_type = other DNA
tttttttaagcagtggtatcaacgcagagtacnncaattggcnnacggtaacnntttttttttttttttttttttttttttttt

SEQ ID NO: 3092 - DNA, 84 bp, synthetic construct
  source 1..84: mol_type = other DNA
tttttttaagcagtggtatcaacgcagagtacnncaattggcnnaagtggtgnntttttttttttttttttttttttttttttt

SEQ ID NO: 3093 - DNA, 84 bp, synthetic construct
  source 1..84: mol_type = other DNA
tttttttaagcagtggtatcaacgcagagtacnncaattggcnnggagacaanntttttttttttttttttttttttttttttt

SEQ ID NO: 3094 - DNA, 84 bp, synthetic construct
  source 1..84: mol_type = other DNA
tttttttaagcagtggtatcaacgcagagtacnncaattggcnntcaaggacnntttttttttttttttttttttttttttttt

SEQ ID NO: 3095 - DNA, 84 bp, synthetic construct
  source 1..84: mol_type = other DNA
tttttttaagcagtggtatcaacgcagagtacnncaattggcnnaagagagcnntttttttttttttttttttttttttttttt

SEQ ID NO: 3096 - DNA, 84 bp, synthetic construct
  source 1..84: mol_type = other DNA
tttttttaagcagtggtatcaacgcagagtacnncaattggcnncgagagatnntttttttttttttttttttttttttttttt

SEQ ID NO: 3097 - DNA, 84 bp, synthetic construct
  source 1..84: mol_type = other DNA
tttttttaagcagtggtatcaacgcagagtacnncaattggcnnacagatggnntttttttttttttttttttttttttttttt

SEQ ID NO: 3098 - DNA, 84 bp, synthetic construct
  source 1..84: mol_type = other DNA
tttttttaagcagtggtatcaacgcagagtacnncaattggcnnaggagtcanntttttttttttttttttttttttttttttt

SEQ ID NO: 3099 - DNA, 84 bp, synthetic construct
  source 1..84: mol_type = other DNA
tttttttaagcagtggtatcaacgcagagtacnncaattggcnncgtgttacnntttttttttttttttttttttttttttttt

SEQ ID NO: 3100 - DNA, 84 bp, synthetic construct
  source 1..84: mol_type = other DNA
tttttttaagcagtggtatcaacgcagagtacnncaattggcnntagtgtgcnntttttttttttttttttttttttttttttt

SEQ ID NO: 3101 - DNA, 84 bp, synthetic construct
  source 1..84: mol_type = other DNA
tttttttaagcagtggtatcaacgcagagtacnncaattggcnnctcatgacnntttttttttttttttttttttttttttttt

SEQ ID NO: 3102 - DNA, 84 bp, synthetic construct
  source 1..84: mol_type = other DNA
tttttttaagcagtggtatcaacgcagagtacnncaattggcnngtatccagnntttttttttttttttttttttttttttttt

SEQ ID NO: 3103 - DNA, 84 bp, synthetic construct
  source 1..84: mol_type = other DNA
tttttttaagcagtggtatcaacgcagagtacnncaattggcnnacgcctatnntttttttttttttttttttttttttttttt

SEQ ID NO: 3104 - DNA, 84 bp, synthetic construct
  source 1..84: mol_type = other DNA
tttttttaagcagtggtatcaacgcagagtacnncaattggcnnaacgacctnntttttttttttttttttttttttttttttt

SEQ ID NO: 3105 - DNA, 84 bp, synthetic construct
  source 1..84: mol_type = other DNA
tttttttaagcagtggtatcaacgcagagtacnncaattggcnnatcaggctnntttttttttttttttttttttttttttttt

SEQ ID NO: 3106 - DNA, 84 bp, synthetic construct
  source 1..84: mol_type = other DNA
tttttttaagcagtggtatcaacgcagagtacnncaattggcnncaagttcgnntttttttttttttttttttttttttttttt

SEQ ID NO: 3107 - DNA, 84 bp, synthetic construct
  source 1..84: mol_type = other DNA
tttttttaagcagtggtatcaacgcagagtacnncaattggcnntagccaganntttttttttttttttttttttttttttttt

SEQ ID NO: 3108 - DNA, 84 bp, synthetic construct
  source 1..84: mol_type = other DNA
tttttttaagcagtggtatcaacgcagagtacnncaattggcnncaatcacgnntttttttttttttttttttttttttttttt

SEQ ID NO: 3109 - DNA, 84 bp, synthetic construct
  source 1..84: mol_type = other DNA
tttttttaagcagtggtatcaacgcagagtacnncaattggcnngcaacaagnntttttttttttttttttttttttttttttt

SEQ ID NO: 3110 - DNA, 84 bp, synthetic construct
  source 1..84: mol_type = other DNA
tttttttaagcagtggtatcaacgcagagtacnncaattggcnncacgacaanntttttttttttttttttttttttttttttt

SEQ ID NO: 3111 - DNA, 84 bp, synthetic construct
  source 1..84: mol_type = other DNA
tttttttaagcagtggtatcaacgcagagtacnncaattggcnntacggaganntttttttttttttttttttttttttttttt

SEQ ID NO: 3112 - DNA, 84 bp, synthetic construct
  source 1..84: mol_type = other DNA
tttttttaagcagtggtatcaacgcagagtacnncaattggcnncgacaaganntttttttttttttttttttttttttttttt

SEQ ID NO: 3113 - DNA, 84 bp, synthetic construct
  source 1..84: mol_type = other DNA
tttttttaagcagtggtatcaacgcagagtacnncaattggcnncgaagtganntttttttttttttttttttttttttttttt

SEQ ID NO: 3114 - DNA, 84 bp, synthetic construct
  source 1..84: mol_type = other DNA
tttttttaagcagtggtatcaacgcagagtacnncaattggcnnagctggtanntttttttttttttttttttttttttttttt

SEQ ID NO: 3115 - DNA, 84 bp, synthetic construct
  source 1..84: mol_type = other DNA
tttttttaagcagtggtatcaacgcagagtacnncaattggcnnaactaggcnntttttttttttttttttttttttttttttt

SEQ ID NO: 3116 - DNA, 84 bp, synthetic construct
  source 1..84: mol_type = other DNA
tttttttaagcagtggtatcaacgcagagtacnncaattggcnncagcaagtnntttttttttttttttttttttttttttttt

SEQ ID NO: 3117 - DNA, 84 bp, synthetic construct
  source 1..84: mol_type = other DNA
tttttttaagcagtggtatcaacgcagagtacnncaattggcnnacgaggtanntttttttttttttttttttttttttttttt

SEQ ID NO: 3118 - DNA, 84 bp, synthetic construct
  source 1..84: mol_type = other DNA
tttttttaagcagtggtatcaacgcagagtacnncaattggcnncatcttccnntttttttttttttttttttttttttttttt

SEQ ID NO: 3119 - DNA, 84 bp, synthetic construct
  source 1..84: mol_type = other DNA
tttttttaagcagtggtatcaacgcagagtacnncaattggcnncctgaatcnntttttttttttttttttttttttttttttt

SEQ ID NO: 3120 - DNA, 84 bp, synthetic construct
  source 1..84: mol_type = other DNA
tttttttaagcagtggtatcaacgcagagtacnncaattggcnntgcagactnntttttttttttttttttttttttttttttt

SEQ ID NO: 3121 - DNA, 84 bp, synthetic construct
  source 1..84: mol_type = other DNA
tttttttaagcagtggtatcaacgcagagtacnncaattggcnnagatgtggnntttttttttttttttttttttttttttttt

SEQ ID NO: 3122 - DNA, 84 bp, synthetic construct
  source 1..84: mol_type = other DNA
tttttttaagcagtggtatcaacgcagagtacnncaattggcnnagttcgacnntttttttttttttttttttttttttttttt

SEQ ID NO: 3123 - DNA, 84 bp, synthetic construct
  source 1..84: mol_type = other DNA
tttttttaagcagtggtatcaacgcagagtacnncaattggcnnacaacctcnntttttttttttttttttttttttttttttt

SEQ ID NO: 3124 - DNA, 84 bp, synthetic construct
  source 1..84: mol_type = other DNA
tttttttaagcagtggtatcaacgcagagtacnncaattggcnncatggtagnntttttttttttttttttttttttttttttt

SEQ ID NO: 3125 - DNA, 84 bp, synthetic construct
  source 1..84: mol_type = other DNA
tttttttaagcagtggtatcaacgcagagtacnncaattggcnncgtatctcnntttttttttttttttttttttttttttttt

SEQ ID NO: 3126 - DNA, 84 bp, synthetic construct
  source 1..84: mol_type = other DNA
tttttttaagcagtggtatcaacgcagagtacnncaattggcnncctagttcnntttttttttttttttttttttttttttttt

SEQ ID NO: 3127 - DNA, 84 bp, synthetic construct
  source 1..84: mol_type = other DNA
tttttttaagcagtggtatcaacgcagagtacnncaattggcnncaagagtcnntttttttttttttttttttttttttttttt

SEQ ID NO: 3128 - DNA, 84 bp, synthetic construct
  source 1..84: mol_type = other DNA
tttttttaagcagtggtatcaacgcagagtacnntcgaatggnnaatcggcanntttttttttttttttttttttttttttttt

SEQ ID NO: 3129 - DNA, 84 bp, synthetic construct
  source 1..84: mol_type = other DNA
tttttttaagcagtggtatcaacgcagagtacnntcgaatggnntacggcatnntttttttttttttttttttttttttttttt

SEQ ID NO: 3130 - DNA, 84 bp, synthetic construct
  source 1..84: mol_type = other DNA
tttttttaagcagtggtatcaacgcagagtacnntcgaatggnnttggatcgnntttttttttttttttttttttttttttttt

SEQ ID NO: 3131 - DNA, 84 bp, synthetic construct
  source 1..84: mol_type = other DNA
tttttttaagcagtggtatcaacgcagagtacnntcgaatggnntggaacganntttttttttttttttttttttttttttttt

SEQ ID NO: 3132 - DNA, 84 bp, synthetic construct
  source 1..84: mol_type = other DNA
tttttttaagcagtggtatcaacgcagagtacnntcgaatggnnggcaatcanntttttttttttttttttttttttttttttt

SEQ ID NO: 3133 - DNA, 84 bp, synthetic construct
  source 1..84: mol_type = other DNA
tttttttaagcagtggtatcaacgcagagtacnntcgaatggnngaatccganntttttttttttttttttttttttttttttt

SEQ ID NO: 3134 - DNA, 84 bp, synthetic construct
  source 1..84: mol_type = other DNA
tttttttaagcagtggtatcaacgcagagtacnntcgaatggnnttacggtgnntttttttttttttttttttttttttttttt

SEQ ID NO: 3135 - DNA, 84 bp, synthetic construct
  source 1..84: mol_type = other DNA
tttttttaagcagtggtatcaacgcagagtacnntcgaatggnncatatcggnntttttttttttttttttttttttttttttt

SEQ ID NO: 3136 - DNA, 84 bp, synthetic construct
  source 1..84: mol_type = other DNA
tttttttaagcagtggtatcaacgcagagtacnntcgaatggnncttcggtanntttttttttttttttttttttttttttttt

SEQ ID NO: 3137 - DNA, 84 bp, synthetic construct
  source 1..84: mol_type = other DNA
tttttttaagcagtggtatcaacgcagagtacnntcgaatggnntcctaacgnntttttttttttttttttttttttttttttt

SEQ ID NO: 3138 - DNA, 84 bp, synthetic construct
  source 1..84: mol_type = other DNA
tttttttaagcagtggtatcaacgcagagtacnntcgaatggnngtaagccanntttttttttttttttttttttttttttttt

SEQ ID NO: 3139 - DNA, 84 bp, synthetic construct
  source 1..84: mol_type = other DNA
tttttttaagcagtggtatcaacgcagagtacnntcgaatggnntaaggtggnntttttttttttttttttttttttttttttt

SEQ ID NO: 3140 - DNA, 84 bp, synthetic construct
  source 1..84: mol_type = other DNA
tttttttaagcagtggtatcaacgcagagtacnntcgaatggnnggtaagctnntttttttttttttttttttttttttttttt

SEQ ID NO: 3141 - DNA, 84 bp, synthetic construct
  source 1..84: mol_type = other DNA
tttttttaagcagtggtatcaacgcagagtacnntcgaatggnntgtgtcganntttttttttttttttttttttttttttttt

SEQ ID NO: 3142 - DNA, 84 bp, synthetic construct
  source 1..84: mol_type = other DNA
tttttttaagcagtggtatcaacgcagagtacnntcgaatggnngagcatganntttttttttttttttttttttttttttttt

SEQ ID NO: 3143 - DNA, 84 bp, synthetic construct
  source 1..84: mol_type = other DNA
tttttttaagcagtggtatcaacgcagagtacnntcgaatggnntcgaagtcnntttttttttttttttttttttttttttttt

SEQ ID NO: 3144 - DNA, 84 bp, synthetic construct
  source 1..84: mol_type = other DNA
tttttttaagcagtggtatcaacgcagagtacnntcgaatggnnggtgaacanntttttttttttttttttttttttttttttt

SEQ ID NO: 3145 - DNA, 84 bp, synthetic construct
  source 1..84: mol_type = other DNA
tttttttaagcagtggtatcaacgcagagtacnntcgaatggnnacatgcacnntttttttttttttttttttttttttttttt

SEQ ID NO: 3146 - DNA, 84 bp, synthetic construct
  source 1..84: mol_type = other DNA
tttttttaagcagtggtatcaacgcagagtacnntcgaatggnnccaacagtnntttttttttttttttttttttttttttttt

SEQ ID NO: 3147 - DNA, 84 bp, synthetic construct
  source 1..84: mol_type = other DNA
tttttttaagcagtggtatcaacgcagagtacnntcgaatggnnagaacagcnntttttttttttttttttttttttttttttt

SEQ ID NO: 3148 - DNA, 84 bp, synthetic construct
  source 1..84: mol_type = other DNA
tttttttaagcagtggtatcaacgcagagtacnntcgaatggnngaacacgtnntttttttttttttttttttttttttttttt

SEQ ID NO: 3149 - DNA, 84 bp, synthetic construct
  source 1..84: mol_type = other DNA
tttttttaagcagtggtatcaacgcagagtacnntcgaatggnnggtcttcanntttttttttttttttttttttttttttttt

SEQ ID NO: 3150 - DNA, 84 bp, synthetic construct
  source 1..84: mol_type = other DNA
tttttttaagcagtggtatcaacgcagagtacnntcgaatggnnaggttcagnntttttttttttttttttttttttttttttt

SEQ ID NO: 3151 - DNA, 84 bp, synthetic construct
  source 1..84: mol_type = other DNA
tttttttaagcagtggtatcaacgcagagtacnntcgaatggnnctagagcanntttttttttttttttttttttttttttttt

SEQ ID NO: 3152 - DNA, 84 bp, synthetic construct
  source 1..84: mol_type = other DNA
tttttttaagcagtggtatcaacgcagagtacnntcgaatggnncttctagcnntttttttttttttttttttttttttttttt

SEQ ID NO: 3153 - DNA, 84 bp, synthetic construct
  source 1..84: mol_type = other DNA
tttttttaagcagtggtatcaacgcagagtacnntcgaatggnngagtaacgnntttttttttttttttttttttttttttttt

SEQ ID NO: 3154 - DNA, 84 bp, synthetic construct
  source 1..84: mol_type = other DNA
tttttttaagcagtggtatcaacgcagagtacnntcgaatggnnctaagaggnntttttttttttttttttttttttttttttt

SEQ ID NO: 3155 - DNA, 84 bp, synthetic construct
  source 1..84: mol_type = other DNA
tttttttaagcagtggtatcaacgcagagtacnntcgaatggnnacgtgtagnntttttttttttttttttttttttttttttt

SEQ ID NO: 3156 - DNA, 84 bp, synthetic construct
  source 1..84: mol_type = other DNA
tttttttaagcagtggtatcaacgcagagtacnntcgaatggnnactacaggnntttttttttttttttttttttttttttttt

SEQ ID NO: 3157 - DNA, 84 bp, synthetic construct
  source 1..84: mol_type = other DNA
tttttttaagcagtggtatcaacgcagagtacnntcgaatggnntacaggtcnntttttttttttttttttttttttttttttt

SEQ ID NO: 3158 - DNA, 84 bp, synthetic construct
  source 1..84: mol_type = other DNA
tttttttaagcagtggtatcaacgcagagtacnntcgaatggnnctcacatgnntttttttttttttttttttttttttttttt

SEQ ID NO: 3159 - DNA, 84 bp, synthetic construct
  source 1..84: mol_type = other DNA
tttttttaagcagtggtatcaacgcagagtacnntcgaatggnnactaggagnntttttttttttttttttttttttttttttt

SEQ ID NO: 3160 - DNA, 84 bp, synthetic construct
  source 1..84: mol_type = other DNA
tttttttaagcagtggtatcaacgcagagtacnntcgaatggnnccatagganntttttttttttttttttttttttttttttt

SEQ ID NO: 3161 - DNA, 84 bp, synthetic construct
  source 1..84: mol_type = other DNA
tttttttaagcagtggtatcaacgcagagtacnntcgaatggnnggagaatcnntttttttttttttttttttttttttttttt

SEQ ID NO: 3162 - DNA, 84 bp, synthetic construct
  source 1..84: mol_type = other DNA
tttttttaagcagtggtatcaacgcagagtacnntcgaatggnngccaagaanntttttttttttttttttttttttttttttt

SEQ ID NO: 3163 - DNA, 84 bp, synthetic construct
  source 1..84: mol_type = other DNA
tttttttaagcagtggtatcaacgcagagtacnntcgaatggnnaaggcaagnntttttttttttttttttttttttttttttt

SEQ ID NO: 3164 - DNA, 84 bp, synthetic construct
  source 1..84: mol_type = other DNA
tttttttaagcagtggtatcaacgcagagtacnntcgaatggnnaatgtcgcnntttttttttttttttttttttttttttttt

SEQ ID NO: 3165 - DNA, 84 bp, synthetic construct
  source 1..84: mol_type = other DNA
tttttttaagcagtggtatcaacgcagagtacnntcgaatggnnatggaaccnntttttttttttttttttttttttttttttt

SEQ ID NO: 3166 - DNA, 84 bp, synthetic construct
  source 1..84: mol_type = other DNA
tttttttaagcagtggtatcaacgcagagtacnntcgaatggnnagaggcatnntttttttttttttttttttttttttttttt

SEQ ID NO: 3167 - DNA, 84 bp, synthetic construct
  source 1..84: mol_type = other DNA
tttttttaagcagtggtatcaacgcagagtacnntcgaatggnntgcatagcnntttttttttttttttttttttttttttttt

SEQ ID NO: 3168 - DNA, 84 bp, synthetic construct
  source 1..84: mol_type = other DNA
tttttttaagcagtggtatcaacgcagagtacnntcgaatggnnctaacgganntttttttttttttttttttttttttttttt

SEQ ID NO: 3169 - DNA, 84 bp, synthetic construct
  source 1..84: mol_type = other DNA
tttttttaagcagtggtatcaacgcagagtacnntcgaatggnntatcgaggnntttttttttttttttttttttttttttttt

SEQ ID NO: 3170 - DNA, 84 bp, synthetic construct
  source 1..84: mol_type = other DNA
tttttttaagcagtggtatcaacgcagagtacnntcgaatggnncatagcctnntttttttttttttttttttttttttttttt

SEQ ID NO: 3171 - DNA, 84 bp, synthetic construct
  source 1..84: mol_type = other DNA
tttttttaagcagtggtatcaacgcagagtacnntcgaatggnnatcgagacnntttttttttttttttttttttttttttttt

SEQ ID NO: 3172 - DNA, 84 bp, synthetic construct
  source 1..84: mol_type = other DNA
tttttttaagcagtggtatcaacgcagagtacnntcgaatggnnggaagagtnntttttttttttttttttttttttttttttt

SEQ ID NO: 3173 - DNA, 84 bp, synthetic construct
  source 1..84: mol_type = other DNA
tttttttaagcagtggtatcaacgcagagtacnntcgaatggnnccaagtagnntttttttttttttttttttttttttttttt

SEQ ID NO: 3174 - DNA, 84 bp, synthetic construct
  source 1..84: mol_type = other DNA
tttttttaagcagtggtatcaacgcagagtacnntcgaatggnnctgaacagnntttttttttttttttttttttttttttttt

SEQ ID NO: 3175 - DNA, 84 bp, synthetic construct
  source 1..84: mol_type = other DNA
tttttttaagcagtggtatcaacgcagagtacnntcgaatggnngtaggttcnntttttttttttttttttttttttttttttt

SEQ ID NO: 3176 - DNA, 84 bp, synthetic construct
  source 1..84: mol_type = other DNA
tttttttaagcagtggtatcaacgcagagtacnntcgaatggnngtatggacnntttttttttttttttttttttttttttttt

SEQ ID NO: 3177 - DNA, 84 bp, synthetic construct
  source 1..84: mol_type = other DNA
tttttttaagcagtggtatcaacgcagagtacnntcgaatggnntcgcaacanntttttttttttttttttttttttttttttt

SEQ ID NO: 3178 - DNA, 84 bp, synthetic construct
  source 1..84: mol_type = other DNA
tttttttaagcagtggtatcaacgcagagtacnntcgaatggnnccgctaatnntttttttttttttttttttttttttttttt

SEQ ID NO: 3179 - DNA, 84 bp, synthetic construct
  source 1..84: mol_type = other DNA
tttttttaagcagtggtatcaacgcagagtacnntcgaatggnngattcgcanntttttttttttttttttttttttttttttt

SEQ ID NO: 3180 - DNA, 84 bp, synthetic construct
  source 1..84: mol_type = other DNA
tttttttaagcagtggtatcaacgcagagtacnntcgaatggnncgatggaanntttttttttttttttttttttttttttttt

SEQ ID NO: 3181 - DNA, 84 bp, synthetic construct
  source 1..84: mol_type = other DNA
tttttttaagcagtggtatcaacgcagagtacnntcgaatggnnagcaagganntttttttttttttttttttttttttttttt

SEQ ID NO: 3182 - DNA, 84 bp, synthetic construct
  source 1..84: mol_type = other DNA
tttttttaagcagtggtatcaacgcagagtacnntcgaatggnncgtagcaanntttttttttttttttttttttttttttttt

SEQ ID NO: 3183 - DNA, 84 bp, synthetic construct
  source 1..84: mol_type = other DNA
tttttttaagcagtggtatcaacgcagagtacnntcgaatggnntggcagtanntttttttttttttttttttttttttttttt

SEQ ID NO: 3184 - DNA, 84 bp, synthetic construct
  source 1..84: mol_type = other DNA
tttttttaagcagtggtatcaacgcagagtacnntcgaatggnncggtagttnntttttttttttttttttttttttttttttt

SEQ ID NO: 3185 - DNA, 84 bp, synthetic construct
  source 1..84: mol_type = other DNA
tttttttaagcagtggtatcaacgcagagtacnntcgaatggnntgacttcgnntttttttttttttttttttttttttttttt

SEQ ID NO: 3186 - DNA, 84 bp, synthetic construct
  source 1..84: mol_type = other DNA
tttttttaagcagtggtatcaacgcagagtacnntcgaatggnngagtgcaanntttttttttttttttttttttttttttttt

SEQ ID NO: 3187 - DNA, 84 bp, synthetic construct
  source 1..84: mol_type = other DNA
tttttttaagcagtggtatcaacgcagagtacnntcgaatggnnacggtaacnntttttttttttttttttttttttttttttt

SEQ ID NO: 3188 - DNA, 84 bp, synthetic construct
  source 1..84: mol_type = other DNA
tttttttaagcagtggtatcaacgcagagtacnntcgaatggnnaagtggtgnntttttttttttttttttttttttttttttt

SEQ ID NO: 3189 - DNA, 84 bp, synthetic construct
  source 1..84: mol_type = other DNA
tttttttaagcagtggtatcaacgcagagtacnntcgaatggnnggagacaanntttttttttttttttttttttttttttttt

SEQ ID NO: 3190 - DNA, 84 bp, synthetic construct
  source 1..84: mol_type = other DNA
tttttttaagcagtggtatcaacgcagagtacnntcgaatggnntcaaggacnntttttttttttttttttttttttttttttt

SEQ ID NO: 3191 - DNA, 84 bp, synthetic construct
  source 1..84: mol_type = other DNA
tttttttaagcagtggtatcaacgcagagtacnntcgaatggnnaagagagcnntttttttttttttttttttttttttttttt

SEQ ID NO: 3192 - DNA, 84 bp, synthetic construct
  source 1..84: mol_type = other DNA
tttttttaagcagtggtatcaacgcagagtacnntcgaatggnncgagagatnntttttttttttttttttttttttttttttt

SEQ ID NO: 3193 - DNA, 84 bp, synthetic construct
  source 1..84: mol_type = other DNA
tttttttaagcagtggtatcaacgcagagtacnntcgaatggnnacagatggnntttttttttttttttttttttttttttttt

SEQ ID NO: 3194 - DNA, 84 bp, synthetic construct
  source 1..84: mol_type = other DNA
tttttttaagcagtggtatcaacgcagagtacnntcgaatggnnaggagtcanntttttttttttttttttttttttttttttt

SEQ ID NO: 3195 - DNA, 84 bp, synthetic construct
  source 1..84: mol_type = other DNA
tttttttaagcagtggtatcaacgcagagtacnntcgaatggnncgtgttacnntttttttttttttttttttttttttttttt

SEQ ID NO: 3196 - DNA, 84 bp, synthetic construct
  source 1..84: mol_type = other DNA
tttttttaagcagtggtatcaacgcagagtacnntcgaatggnntagtgtgcnntttttttttttttttttttttttttttttt

SEQ ID NO: 3197 - DNA, 84 bp, synthetic construct
  source 1..84: mol_type = other DNA
tttttttaagcagtggtatcaacgcagagtacnntcgaatggnnctcatgacnntttttttttttttttttttttttttttttt

SEQ ID NO: 3198 - DNA, 84 bp, synthetic construct
  source 1..84: mol_type = other DNA
tttttttaagcagtggtatcaacgcagagtacnntcgaatggnngtatccagnntttttttttttttttttttttttttttttt

SEQ ID NO: 3199 - DNA, 84 bp, synthetic construct
  source 1..84: mol_type = other DNA
tttttttaagcagtggtatcaacgcagagtacnntcgaatggnnacgcctatnntttttttttttttttttttttttttttttt

SEQ ID NO: 3200 - DNA, 84 bp, synthetic construct
  source 1..84: mol_type = other DNA
tttttttaagcagtggtatcaacgcagagtacnntcgaatggnnaacgacctnntttttttttttttttttttttttttttttt

SEQ ID NO: 3201 - DNA, 84 bp, synthetic construct
  source 1..84: mol_type = other DNA
tttttttaagcagtggtatcaacgcagagtacnntcgaatggnnatcaggctnntttttttttttttttttttttttttttttt

SEQ ID NO: 3202 - DNA, 84 bp, synthetic construct
  source 1..84: mol_type = other DNA
tttttttaagcagtggtatcaacgcagagtacnntcgaatggnncaagttcgnntttttttttttttttttttttttttttttt

SEQ ID NO: 3203 - DNA, 84 bp, synthetic construct
  source 1..84: mol_type = other DNA
tttttttaagcagtggtatcaacgcagagtacnntcgaatggnntagccaganntttttttttttttttttttttttttttttt

SEQ ID NO: 3204 - DNA, 84 bp, synthetic construct
  source 1..84: mol_type = other DNA
tttttttaagcagtggtatcaacgcagagtacnntcgaatggnncaatcacgnntttttttttttttttttttttttttttttt

SEQ ID NO: 3205 - DNA, 84 bp, synthetic construct
  source 1..84: mol_type = other DNA
tttttttaagcagtggtatcaacgcagagtacnntcgaatggnngcaacaagnntttttttttttttttttttttttttttttt

SEQ ID NO: 3206 - DNA, 84 bp, synthetic construct
  source 1..84: mol_type = other DNA
tttttttaagcagtggtatcaacgcagagtacnntcgaatggnncacgacaanntttttttttttttttttttttttttttttt

SEQ ID NO: 3207 - DNA, 84 bp, synthetic construct
  source 1..84: mol_type = other DNA
tttttttaagcagtggtatcaacgcagagtacnntcgaatggnntacggaganntttttttttttttttttttttttttttttt

SEQ ID NO: 3208 - DNA, 84 bp, synthetic construct
  source 1..84: mol_type = other DNA
tttttttaagcagtggtatcaacgcagagtacnntcgaatggnncgacaaganntttttttttttttttttttttttttttttt

SEQ ID NO: 3209 - DNA, 84 bp, synthetic construct
  source 1..84: mol_type = other DNA
tttttttaagcagtggtatcaacgcagagtacnntcgaatggnncgaagtganntttttttttttttttttttttttttttttt

SEQ ID NO: 3210 - DNA, 84 bp, synthetic construct
  source 1..84: mol_type = other DNA
tttttttaagcagtggtatcaacgcagagtacnntcgaatggnnagctggtanntttttttttttttttttttttttttttttt

SEQ ID NO: 3211 - DNA, 84 bp, synthetic construct
  source 1..84: mol_type = other DNA
tttttttaagcagtggtatcaacgcagagtacnntcgaatggnnaactaggcnntttttttttttttttttttttttttttttt

SEQ ID NO: 3212 - DNA, 84 bp, synthetic construct
  source 1..84: mol_type = other DNA
tttttttaagcagtggtatcaacgcagagtacnntcgaatggnncagcaagtnntttttttttttttttttttttttttttttt

SEQ ID NO: 3213 - DNA, 84 bp, synthetic construct
  source 1..84: mol_type = other DNA
tttttttaagcagtggtatcaacgcagagtacnntcgaatggnnacgaggtanntttttttttttttttttttttttttttttt

SEQ ID NO: 3214 - DNA, 84 bp, synthetic construct
  source 1..84: mol_type = other DNA
tttttttaagcagtggtatcaacgcagagtacnntcgaatggnncatcttccnntttttttttttttttttttttttttttttt

SEQ ID NO: 3215 - DNA, 84 bp, synthetic construct
  source 1..84: mol_type = other DNA
tttttttaagcagtggtatcaacgcagagtacnntcgaatggnncctgaatcnntttttttttttttttttttttttttttttt

SEQ ID NO: 3216 - DNA, 84 bp, synthetic construct
  source 1..84: mol_type = other DNA
tttttttaagcagtggtatcaacgcagagtacnntcgaatggnntgcagactnntttttttttttttttttttttttttttttt

SEQ ID NO: 3217 - DNA, 84 bp, synthetic construct
  source 1..84: mol_type = other DNA
tttttttaagcagtggtatcaacgcagagtacnntcgaatggnnagatgtggnntttttttttttttttttttttttttttttt

SEQ ID NO: 3218 - DNA, 84 bp, synthetic construct
  source 1..84: mol_type = other DNA
tttttttaagcagtggtatcaacgcagagtacnntcgaatggnnagttcgacnntttttttttttttttttttttttttttttt

SEQ ID NO: 3219 - DNA, 84 bp, synthetic construct
  source 1..84: mol_type = other DNA
tttttttaagcagtggtatcaacgcagagtacnntcgaatggnnacaacctcnntttttttttttttttttttttttttttttt

SEQ ID NO: 3220 - DNA, 84 bp, synthetic construct
  source 1..84: mol_type = other DNA
tttttttaagcagtggtatcaacgcagagtacnntcgaatggnncatggtagnntttttttttttttttttttttttttttttt

SEQ ID NO: 3221 - DNA, 84 bp, synthetic construct
  source 1..84: mol_type = other DNA
tttttttaagcagtggtatcaacgcagagtacnntcgaatggnncgtatctcnntttttttttttttttttttttttttttttt

SEQ ID NO: 3222 - DNA, 84 bp, synthetic construct
  source 1..84: mol_type = other DNA
tttttttaagcagtggtatcaacgcagagtacnntcgaatggnncctagttcnntttttttttttttttttttttttttttttt

SEQ ID NO: 3223 - DNA, 84 bp, synthetic construct
  source 1..84: mol_type = other DNA
tttttttaagcagtggtatcaacgcagagtacnntcgaatggnncaagagtcnntttttttttttttttttttttttttttttt

SEQ ID NO: 3224 - DNA, 84 bp, synthetic construct
  source 1..84: mol_type = other DNA
tttttttaagcagtggtatcaacgcagagtacnnaaggtgcannaatcggcanntttttttttttttttttttttttttttttt

SEQ ID NO: 3225 - DNA, 84 bp, synthetic construct
  source 1..84: mol_type = other DNA
tttttttaagcagtggtatcaacgcagagtacnnaaggtgcanntacggcatnntttttttttttttttttttttttttttttt

SEQ ID NO: 3226 - DNA, 84 bp, synthetic construct
  source 1..84: mol_type = other DNA
tttttttaagcagtggtatcaacgcagagtacnnaaggtgcannttggatcgnntttttttttttttttttttttttttttttt

SEQ ID NO: 3227 - DNA, 84 bp, synthetic construct
  source 1..84: mol_type = other DNA
tttttttaagcagtggtatcaacgcagagtacnnaaggtgcanntggaacganntttttttttttttttttttttttttttttt

SEQ ID NO: 3228 - DNA, 84 bp, synthetic construct
  source 1..84: mol_type = other DNA
tttttttaagcagtggtatcaacgcagagtacnnaaggtgcannggcaatcanntttttttttttttttttttttttttttttt

SEQ ID NO: 3229 - DNA, 84 bp, synthetic construct
  source 1..84: mol_type = other DNA
tttttttaagcagtggtatcaacgcagagtacnnaaggtgcanngaatccganntttttttttttttttttttttttttttttt

SEQ ID NO: 3230 - DNA, 84 bp, synthetic construct
  source 1..84: mol_type = other DNA
tttttttaagcagtggtatcaacgcagagtacnnaaggtgcannttacggtgnntttttttttttttttttttttttttttttt

SEQ ID NO: 3231 - DNA, 84 bp, synthetic construct
  source 1..84: mol_type = other DNA
tttttttaagcagtggtatcaacgcagagtacnnaaggtgcanncatatcggnntttttttttttttttttttttttttttttt

SEQ ID NO: 3232 - DNA, 84 bp, synthetic construct
  source 1..84: mol_type = other DNA
tttttttaagcagtggtatcaacgcagagtacnnaaggtgcanncttcggtanntttttttttttttttttttttttttttttt

SEQ ID NO: 3233 - DNA, 84 bp, synthetic construct
  source 1..84: mol_type = other DNA
tttttttaagcagtggtatcaacgcagagtacnnaaggtgcanntcctaacgnntttttttttttttttttttttttttttttt

SEQ ID NO: 3234 - DNA, 84 bp, synthetic construct
  source 1..84: mol_type = other DNA
tttttttaagcagtggtatcaacgcagagtacnnaaggtgcanngtaagccanntttttttttttttttttttttttttttttt

SEQ ID NO: 3235 - DNA, 84 bp, synthetic construct
  source 1..84: mol_type = other DNA
tttttttaagcagtggtatcaacgcagagtacnnaaggtgcanntaaggtggnntttttttttttttttttttttttttttttt

SEQ ID NO: 3236 - DNA, 84 bp, synthetic construct
  source 1..84: mol_type = other DNA
tttttttaagcagtggtatcaacgcagagtacnnaaggtgcannggtaagctnntttttttttttttttttttttttttttttt

SEQ ID NO: 3237 - DNA, 84 bp, synthetic construct
  source 1..84: mol_type = other DNA
tttttttaagcagtggtatcaacgcagagtacnnaaggtgcanntgtgtcganntttttttttttttttttttttttttttttt

SEQ ID NO: 3238 - DNA, 84 bp, synthetic construct
  source 1..84: mol_type = other DNA
tttttttaagcagtggtatcaacgcagagtacnnaaggtgcanngagcatganntttttttttttttttttttttttttttttt

SEQ ID NO: 3239 - DNA, 84 bp, synthetic construct
  source 1..84: mol_type = other DNA
tttttttaagcagtggtatcaacgcagagtacnnaaggtgcanntcgaagtcnntttttttttttttttttttttttttttttt

SEQ ID NO: 3240 - DNA, 84 bp, synthetic construct
  source 1..84: mol_type = other DNA
tttttttaagcagtggtatcaacgcagagtacnnaaggtgcannggtgaacanntttttttttttttttttttttttttttttt

SEQ ID NO: 3241 - DNA, 84 bp, synthetic construct
  source 1..84: mol_type = other DNA
tttttttaagcagtggtatcaacgcagagtacnnaaggtgcannacatgcacnntttttttttttttttttttttttttttttt

SEQ ID NO: 3242 - DNA, 84 bp, synthetic construct
  source 1..84: mol_type = other DNA
tttttttaagcagtggtatcaacgcagagtacnnaaggtgcannccaacagtnntttttttttttttttttttttttttttttt

SEQ ID NO: 3243 - DNA, 84 bp, synthetic construct
  source 1..84: mol_type = other DNA
tttttttaagcagtggtatcaacgcagagtacnnaaggtgcannagaacagcnntttttttttttttttttttttttttttttt

SEQ ID NO: 3244 - DNA, 84 bp, synthetic construct
  source 1..84: mol_type = other DNA
tttttttaagcagtggtatcaacgcagagtacnnaaggtgcanngaacacgtnntttttttttttttttttttttttttttttt

SEQ ID NO: 3245 - DNA, 84 bp, synthetic construct
  source 1..84: mol_type = other DNA
tttttttaagcagtggtatcaacgcagagtacnnaaggtgcannggtcttcanntttttttttttttttttttttttttttttt

SEQ ID NO: 3246 - DNA, 84 bp, synthetic construct
  source 1..84: mol_type = other DNA
tttttttaagcagtggtatcaacgcagagtacnnaaggtgcannaggttcagnntttttttttttttttttttttttttttttt

SEQ ID NO: 3247 - DNA, 84 bp, synthetic construct
  source 1..84: mol_type = other DNA
tttttttaagcagtggtatcaacgcagagtacnnaaggtgcannctagagcanntttttttttttttttttttttttttttttt

SEQ ID NO: 3248 - DNA, 84 bp, synthetic construct
  source 1..84: mol_type = other DNA
tttttttaagcagtggtatcaacgcagagtacnnaaggtgcanncttctagcnntttttttttttttttttttttttttttttt

SEQ ID NO: 3249 - DNA, 84 bp, synthetic construct
  source 1..84: mol_type = other DNA
tttttttaagcagtggtatcaacgcagagtacnnaaggtgcanngagtaacgnntttttttttttttttttttttttttttttt

SEQ ID NO: 3250 - DNA, 84 bp, synthetic construct
  source 1..84: mol_type = other DNA
tttttttaagcagtggtatcaacgcagagtacnnaaggtgcannctaagaggnntttttttttttttttttttttttttttttt

SEQ ID NO: 3251 - DNA, 84 bp, synthetic construct
  source 1..84: mol_type = other DNA
tttttttaagcagtggtatcaacgcagagtacnnaaggtgcannacgtgtagnntttttttttttttttttttttttttttttt

SEQ ID NO: 3252 - DNA, 84 bp, synthetic construct
  source 1..84: mol_type = other DNA
tttttttaagcagtggtatcaacgcagagtacnnaaggtgcannactacaggnntttttttttttttttttttttttttttttt

SEQ ID NO: 3253 - DNA, 84 bp, synthetic construct
  source 1..84: mol_type = other DNA
tttttttaagcagtggtatcaacgcagagtacnnaaggtgcanntacaggtcnntttttttttttttttttttttttttttttt

SEQ ID NO: 3254 - DNA, 84 bp, synthetic construct
  source 1..84: mol_type = other DNA
tttttttaagcagtggtatcaacgcagagtacnnaaggtgcannctcacatgnntttttttttttttttttttttttttttttt

SEQ ID NO: 3255 - DNA, 84 bp, synthetic construct
  source 1..84: mol_type = other DNA
tttttttaagcagtggtatcaacgcagagtacnnaaggtgcannactaggagnntttttttttttttttttttttttttttttt

SEQ ID NO: 3256 - DNA, 84 bp, synthetic construct
  source 1..84: mol_type = other DNA
tttttttaagcagtggtatcaacgcagagtacnnaaggtgcannccatagganntttttttttttttttttttttttttttttt

SEQ ID NO: 3257 - DNA, 84 bp, synthetic construct
  source 1..84: mol_type = other DNA
tttttttaagcagtggtatcaacgcagagtacnnaaggtgcannggagaatcnntttttttttttttttttttttttttttttt

SEQ ID NO: 3258 - DNA, 84 bp, synthetic construct
  source 1..84: mol_type = other DNA
tttttttaagcagtggtatcaacgcagagtacnnaaggtgcanngccaagaanntttttttttttttttttttttttttttttt

SEQ ID NO: 3259 - DNA, 84 bp, synthetic construct
  source 1..84: mol_type = other DNA
tttttttaagcagtggtatcaacgcagagtacnnaaggtgcannaaggcaagnntttttttttttttttttttttttttttttt

SEQ ID NO: 3260 - DNA, 84 bp, synthetic construct
  source 1..84: mol_type = other DNA
tttttttaagcagtggtatcaacgcagagtacnnaaggtgcannaatgtcgcnntttttttttttttttttttttttttttttt

SEQ ID NO: 3261 - DNA, 84 bp, synthetic construct
  source 1..84: mol_type = other DNA
tttttttaagcagtggtatcaacgcagagtacnnaaggtgcannatggaaccnntttttttttttttttttttttttttttttt

SEQ ID NO: 3262 - DNA, 84 bp, synthetic construct
  source 1..84: mol_type = other DNA
tttttttaagcagtggtatcaacgcagagtacnnaaggtgcannagaggcatnntttttttttttttttttttttttttttttt

SEQ ID NO: 3263 - DNA, 84 bp, synthetic construct
  source 1..84: mol_type = other DNA
tttttttaagcagtggtatcaacgcagagtacnnaaggtgcanntgcatagcnntttttttttttttttttttttttttttttt

SEQ ID NO: 3264 - DNA, 84 bp, synthetic construct
  source 1..84: mol_type = other DNA
tttttttaagcagtggtatcaacgcagagtacnnaaggtgcannctaacgganntttttttttttttttttttttttttttttt

SEQ ID NO: 3265 - DNA, 84 bp, synthetic construct
  source 1..84: mol_type = other DNA
tttttttaagcagtggtatcaacgcagagtacnnaaggtgcanntatcgaggnntttttttttttttttttttttttttttttt

SEQ ID NO: 3266 - DNA, 84 bp, synthetic construct
  source 1..84: mol_type = other DNA
tttttttaagcagtggtatcaacgcagagtacnnaaggtgcanncatagcctnntttttttttttttttttttttttttttttt

SEQ ID NO: 3267 - DNA, 84 bp, synthetic construct
  source 1..84: mol_type = other DNA
tttttttaagcagtggtatcaacgcagagtacnnaaggtgcannatcgagacnntttttttttttttttttttttttttttttt

SEQ ID NO: 3268 - DNA, 84 bp, synthetic construct
  source 1..84: mol_type = other DNA
tttttttaagcagtggtatcaacgcagagtacnnaaggtgcannggaagagtnntttttttttttttttttttttttttttttt

SEQ ID NO: 3269 - DNA, 84 bp, synthetic construct
  source 1..84: mol_type = other DNA
tttttttaagcagtggtatcaacgcagagtacnnaaggtgcannccaagtagnntttttttttttttttttttttttttttttt

SEQ ID NO: 3270 - DNA, 84 bp, synthetic construct
  source 1..84: mol_type = other DNA
tttttttaagcagtggtatcaacgcagagtacnnaaggtgcannctgaacagnntttttttttttttttttttttttttttttt

SEQ ID NO: 3271 - DNA, 84 bp, synthetic construct
  source 1..84: mol_type = other DNA
tttttttaagcagtggtatcaacgcagagtacnnaaggtgcanngtaggttcnntttttttttttttttttttttttttttttt

SEQ ID NO: 3272 - DNA, 84 bp, synthetic construct
  source 1..84: mol_type = other DNA
tttttttaagcagtggtatcaacgcagagtacnnaaggtgcanngtatggacnntttttttttttttttttttttttttttttt

SEQ ID NO: 3273 - DNA, 84 bp, synthetic construct
  source 1..84: mol_type = other DNA
tttttttaagcagtggtatcaacgcagagtacnnaaggtgcanntcgcaacanntttttttttttttttttttttttttttttt

SEQ ID NO: 3274 - DNA, 84 bp, synthetic construct
  source 1..84: mol_type = other DNA
tttttttaagcagtggtatcaacgcagagtacnnaaggtgcannccgctaatnntttttttttttttttttttttttttttttt

SEQ ID NO: 3275 - DNA, 84 bp, synthetic construct
  source 1..84: mol_type = other DNA
tttttttaagcagtggtatcaacgcagagtacnnaaggtgcanngattcgcanntttttttttttttttttttttttttttttt

SEQ ID NO: 3276 - DNA, 84 bp, synthetic construct
  source 1..84: mol_type = other DNA
tttttttaagcagtggtatcaacgcagagtacnnaaggtgcanncgatggaanntttttttttttttttttttttttttttttt

SEQ ID NO: 3277 - DNA, 84 bp, synthetic construct
  source 1..84: mol_type = other DNA
tttttttaagcagtggtatcaacgcagagtacnnaaggtgcannagcaagganntttttttttttttttttttttttttttttt

SEQ ID NO: 3278 - DNA, 84 bp, synthetic construct
  source 1..84: mol_type = other DNA
tttttttaagcagtggtatcaacgcagagtacnnaaggtgcanncgtagcaanntttttttttttttttttttttttttttttt

SEQ ID NO: 3279 - DNA, 84 bp, synthetic construct
  source 1..84: mol_type = other DNA
tttttttaagcagtggtatcaacgcagagtacnnaaggtgcanntggcagtanntttttttttttttttttttttttttttttt

SEQ ID NO: 3280 - DNA, 84 bp, synthetic construct
  source 1..84: mol_type = other DNA
tttttttaagcagtggtatcaacgcagagtacnnaaggtgcanncggtagttnntttttttttttttttttttttttttttttt

SEQ ID NO: 3281 - DNA, 84 bp, synthetic construct
  source 1..84: mol_type = other DNA
tttttttaagcagtggtatcaacgcagagtacnnaaggtgcanntgacttcgnntttttttttttttttttttttttttttttt

SEQ ID NO: 3282 - DNA, 84 bp, synthetic construct
  source 1..84: mol_type = other DNA
tttttttaagcagtggtatcaacgcagagtacnnaaggtgcanngagtgcaanntttttttttttttttttttttttttttttt

SEQ ID NO: 3283 - DNA, 84 bp, synthetic construct
  source 1..84: mol_type = other DNA
tttttttaagcagtggtatcaacgcagagtacnnaaggtgcannacggtaacnntttttttttttttttttttttttttttttt

SEQ ID NO: 3284 - DNA, 84 bp, synthetic construct
  source 1..84: mol_type = other DNA
tttttttaagcagtggtatcaacgcagagtacnnaaggtgcannaagtggtgnntttttttttttttttttttttttttttttt

SEQ ID NO: 3285 - DNA, 84 bp, synthetic construct
  source 1..84: mol_type = other DNA
tttttttaagcagtggtatcaacgcagagtacnnaaggtgcannggagacaanntttttttttttttttttttttttttttttt

SEQ ID NO: 3286 - DNA, 84 bp, synthetic construct
  source 1..84: mol_type = other DNA
tttttttaagcagtggtatcaacgcagagtacnnaaggtgcanntcaaggacnntttttttttttttttttttttttttttttt

SEQ ID NO: 3287 - DNA, 84 bp, synthetic construct
  source 1..84: mol_type = other DNA
tttttttaagcagtggtatcaacgcagagtacnnaaggtgcannaagagagcnntttttttttttttttttttttttttttttt

SEQ ID NO: 3288 - DNA, 84 bp, synthetic construct
  source 1..84: mol_type = other DNA
tttttttaagcagtggtatcaacgcagagtacnnaaggtgcanncgagagatnntttttttttttttttttttttttttttttt

SEQ ID NO: 3289 - DNA, 84 bp, synthetic construct
  source 1..84: mol_type = other DNA
tttttttaagcagtggtatcaacgcagagtacnnaaggtgcannacagatggnntttttttttttttttttttttttttttttt

SEQ ID NO: 3290 - DNA, 84 bp, synthetic construct
  source 1..84: mol_type = other DNA
tttttttaagcagtggtatcaacgcagagtacnnaaggtgcannaggagtcanntttttttttttttttttttttttttttttt

SEQ ID NO: 3291 - DNA, 84 bp, synthetic construct
  source 1..84: mol_type = other DNA
tttttttaagcagtggtatcaacgcagagtacnnaaggtgcanncgtgttacnntttttttttttttttttttttttttttttt

SEQ ID NO: 3292 - DNA, 84 bp, synthetic construct
  source 1..84: mol_type = other DNA
tttttttaagcagtggtatcaacgcagagtacnnaaggtgcanntagtgtgcnntttttttttttttttttttttttttttttt

SEQ ID NO: 3293 - DNA, 84 bp, synthetic construct
  source 1..84: mol_type = other DNA
tttttttaagcagtggtatcaacgcagagtacnnaaggtgcannctcatgacnntttttttttttttttttttttttttttttt

SEQ ID NO: 3294 - DNA, 84 bp, synthetic construct
  source 1..84: mol_type = other DNA
tttttttaagcagtggtatcaacgcagagtacnnaaggtgcanngtatccagnntttttttttttttttttttttttttttttt

SEQ ID NO: 3295 - DNA, 84 bp, synthetic construct
  source 1..84: mol_type = other DNA
tttttttaagcagtggtatcaacgcagagtacnnaaggtgcannacgcctatnntttttttttttttttttttttttttttttt

SEQ ID NO: 3296 - DNA, 84 bp, synthetic construct
  source 1..84: mol_type = other DNA
tttttttaagcagtggtatcaacgcagagtacnnaaggtgcannaacgacctnntttttttttttttttttttttttttttttt

SEQ ID NO: 3297 - DNA, 84 bp, synthetic construct
  source 1..84: mol_type = other DNA
tttttttaagcagtggtatcaacgcagagtacnnaaggtgcannatcaggctnntttttttttttttttttttttttttttttt

SEQ ID NO: 3298 - DNA, 84 bp, synthetic construct
  source 1..84: mol_type = other DNA
tttttttaagcagtggtatcaacgcagagtacnnaaggtgcanncaagttcgnntttttttttttttttttttttttttttttt

SEQ ID NO: 3299 - DNA, 84 bp, synthetic construct
  source 1..84: mol_type = other DNA
tttttttaagcagtggtatcaacgcagagtacnnaaggtgcanntagccaganntttttttttttttttttttttttttttttt

SEQ ID NO: 3300 - DNA, 84 bp, synthetic construct
  source 1..84: mol_type = other DNA
tttttttaagcagtggtatcaacgcagagtacnnaaggtgcanncaatcacgnntttttttttttttttttttttttttttttt

SEQ ID NO: 3301 - DNA, 84 bp, synthetic construct
  source 1..84: mol_type = other DNA
tttttttaagcagtggtatcaacgcagagtacnnaaggtgcanngcaacaagnntttttttttttttttttttttttttttttt

SEQ ID NO: 3302 - DNA, 84 bp, synthetic construct
  source 1..84: mol_type = other DNA
tttttttaagcagtggtatcaacgcagagtacnnaaggtgcanncacgacaanntttttttttttttttttttttttttttttt

SEQ ID NO: 3303 - DNA, 84 bp, synthetic construct
  source 1..84: mol_type = other DNA
tttttttaagcagtggtatcaacgcagagtacnnaaggtgcanntacggaganntttttttttttttttttttttttttttttt

SEQ ID NO: 3304 - DNA, 84 bp, synthetic construct
  source 1..84: mol_type = other DNA
tttttttaagcagtggtatcaacgcagagtacnnaaggtgcanncgacaaganntttttttttttttttttttttttttttttt

SEQ ID NO: 3305 - DNA, 84 bp, synthetic construct
  source 1..84: mol_type = other DNA
tttttttaagcagtggtatcaacgcagagtacnnaaggtgcanncgaagtganntttttttttttttttttttttttttttttt

SEQ ID NO: 3306 - DNA, 84 bp, synthetic construct
  source 1..84: mol_type = other DNA
tttttttaagcagtggtatcaacgcagagtacnnaaggtgcannagctggtanntttttttttttttttttttttttttttttt

SEQ ID NO: 3307 - DNA, 84 bp, synthetic construct
  source 1..84: mol_type = other DNA
tttttttaagcagtggtatcaacgcagagtacnnaaggtgcannaactaggcnntttttttttttttttttttttttttttttt

SEQ ID NO: 3308 - DNA, 84 bp, synthetic construct
  source 1..84: mol_type = other DNA
tttttttaagcagtggtatcaacgcagagtacnnaaggtgcanncagcaagtnntttttttttttttttttttttttttttttt

SEQ ID NO: 3309 - DNA, 84 bp, synthetic construct
  source 1..84: mol_type = other DNA
tttttttaagcagtggtatcaacgcagagtacnnaaggtgcannacgaggtanntttttttttttttttttttttttttttttt

SEQ ID NO: 3310 - DNA, 84 bp, synthetic construct
  source 1..84: mol_type = other DNA
tttttttaagcagtggtatcaacgcagagtacnnaaggtgcanncatcttccnntttttttttttttttttttttttttttttt

SEQ ID NO: 3311 - DNA, 84 bp, synthetic construct
  source 1..84: mol_type = other DNA
tttttttaagcagtggtatcaacgcagagtacnnaaggtgcanncctgaatcnntttttttttttttttttttttttttttttt

SEQ ID NO: 3312 - DNA, 84 bp, synthetic construct
  source 1..84: mol_type = other DNA
tttttttaagcagtggtatcaacgcagagtacnnaaggtgcanntgcagactnntttttttttttttttttttttttttttttt

SEQ ID NO: 3313 - DNA, 84 bp, synthetic construct
  source 1..84: mol_type = other DNA
tttttttaagcagtggtatcaacgcagagtacnnaaggtgcannagatgtggnntttttttttttttttttttttttttttttt

SEQ ID NO: 3314 - DNA, 84 bp, synthetic construct
  source 1..84: mol_type = other DNA
tttttttaagcagtggtatcaacgcagagtacnnaaggtgcannagttcgacnntttttttttttttttttttttttttttttt

SEQ ID NO: 3315 - DNA, 84 bp, synthetic construct
  source 1..84: mol_type = other DNA
tttttttaagcagtggtatcaacgcagagtacnnaaggtgcannacaacctcnntttttttttttttttttttttttttttttt

SEQ ID NO: 3316 - DNA, 84 bp, synthetic construct
  source 1..84: mol_type = other DNA
tttttttaagcagtggtatcaacgcagagtacnnaaggtgcanncatggtagnntttttttttttttttttttttttttttttt

SEQ ID NO: 3317 - DNA, 84 bp, synthetic construct
  source 1..84: mol_type = other DNA
tttttttaagcagtggtatcaacgcagagtacnnaaggtgcanncgtatctcnntttttttttttttttttttttttttttttt

SEQ ID NO: 3318 - DNA, 84 bp, synthetic construct
  source 1..84: mol_type = other DNA
tttttttaagcagtggtatcaacgcagagtacnnaaggtgcanncctagttcnntttttttttttttttttttttttttttttt

SEQ ID NO: 3319 - DNA, 84 bp, synthetic construct
  source 1..84: mol_type = other DNA
tttttttaagcagtggtatcaacgcagagtacnnaaggtgcanncaagagtcnntttttttttttttttttttttttttttttt

SEQ ID NO: 3320 - DNA, 84 bp, synthetic construct
  source 1..84: mol_type = other DNA
tttttttaagcagtggtatcaacgcagagtacnnacgatcgannaatcggcanntttttttttttttttttttttttttttttt

SEQ ID NO: 3321 - DNA, 84 bp, synthetic construct
  source 1..84: mol_type = other DNA
tttttttaagcagtggtatcaacgcagagtacnnacgatcganntacggcatnntttttttttttttttttttttttttttttt

SEQ ID NO: 3322 - DNA, 84 bp, synthetic construct
  source 1..84: mol_type = other DNA
tttttttaagcagtggtatcaacgcagagtacnnacgatcgannttggatcgnntttttttttttttttttttttttttttttt

SEQ ID NO: 3323 - DNA, 84 bp, synthetic construct
  source 1..84: mol_type = other DNA
tttttttaagcagtggtatcaacgcagagtacnnacgatcganntggaacganntttttttttttttttttttttttttttttt

SEQ ID NO: 3324 - DNA, 84 bp, synthetic construct
  source 1..84: mol_type = other DNA
tttttttaagcagtggtatcaacgcagagtacnnacgatcgannggcaatcanntttttttttttttttttttttttttttttt

SEQ ID NO: 3325 - DNA, 84 bp, synthetic construct
  source 1..84: mol_type = other DNA
tttttttaagcagtggtatcaacgcagagtacnnacgatcganngaatccganntttttttttttttttttttttttttttttt

SEQ ID NO: 3326 - DNA, 84 bp, synthetic construct
  source 1..84: mol_type = other DNA
tttttttaagcagtggtatcaacgcagagtacnnacgatcgannttacggtgnntttttttttttttttttttttttttttttt

SEQ ID NO: 3327 - DNA, 84 bp, synthetic construct
  source 1..84: mol_type = other DNA
tttttttaagcagtggtatcaacgcagagtacnnacgatcganncatatcggnntttttttttttttttttttttttttttttt

SEQ ID NO: 3328 - DNA, 84 bp, synthetic construct
  source 1..84: mol_type = other DNA
tttttttaagcagtggtatcaacgcagagtacnnacgatcganncttcggtanntttttttttttttttttttttttttttttt

SEQ ID NO: 3329 - DNA, 84 bp, synthetic construct
  source 1..84: mol_type = other DNA
tttttttaagcagtggtatcaacgcagagtacnnacgatcganntcctaacgnntttttttttttttttttttttttttttttt

SEQ ID NO: 3330 - DNA, 84 bp, synthetic construct
  source 1..84: mol_type = other DNA
tttttttaagcagtggtatcaacgcagagtacnnacgatcganngtaagccanntttttttttttttttttttttttttttttt

SEQ ID NO: 3331 - DNA, 84 bp, synthetic construct
  source 1..84: mol_type = other DNA
tttttttaagcagtggtatcaacgcagagtacnnacgatcganntaaggtggnntttttttttttttttttttttttttttttt

SEQ ID NO: 3332 - DNA, 84 bp, synthetic construct
  source 1..84: mol_type = other DNA
tttttttaagcagtggtatcaacgcagagtacnnacgatcgannggtaagctnntttttttttttttttttttttttttttttt

SEQ ID NO: 3333 - DNA, 84 bp, synthetic construct
  source 1..84: mol_type = other DNA
tttttttaagcagtggtatcaacgcagagtacnnacgatcganntgtgtcganntttttttttttttttttttttttttttttt

SEQ ID NO: 3334 - DNA, 84 bp, synthetic construct
  source 1..84: mol_type = other DNA
tttttttaagcagtggtatcaacgcagagtacnnacgatcganngagcatganntttttttttttttttttttttttttttttt

SEQ ID NO: 3335 - DNA, 84 bp, synthetic construct
  source 1..84: mol_type = other DNA
tttttttaagcagtggtatcaacgcagagtacnnacgatcganntcgaagtcnntttttttttttttttttttttttttttttt

SEQ ID NO: 3336 - DNA, 84 bp, synthetic construct
  source 1..84: mol_type = other DNA
tttttttaagcagtggtatcaacgcagagtacnnacgatcgannggtgaacanntttttttttttttttttttttttttttttt

SEQ ID NO: 3337 - DNA, 84 bp, synthetic construct
  source 1..84: mol_type = other DNA
tttttttaagcagtggtatcaacgcagagtacnnacgatcgannacatgcacnntttttttttttttttttttttttttttttt

SEQ ID NO: 3338 - DNA, 84 bp, synthetic construct
  source 1..84: mol_type = other DNA
tttttttaagcagtggtatcaacgcagagtacnnacgatcgannccaacagtnntttttttttttttttttttttttttttttt

SEQ ID NO: 3339 - DNA, 84 bp, synthetic construct
  source 1..84: mol_type = other DNA
tttttttaagcagtggtatcaacgcagagtacnnacgatcgannagaacagcnntttttttttttttttttttttttttttttt

SEQ ID NO: 3340 - DNA, 84 bp, synthetic construct
  source 1..84: mol_type = other DNA
tttttttaagcagtggtatcaacgcagagtacnnacgatcganngaacacgtnntttttttttttttttttttttttttttttt

SEQ ID NO: 3341 - DNA, 84 bp, synthetic construct
  source 1..84: mol_type = other DNA
tttttttaagcagtggtatcaacgcagagtacnnacgatcgannggtcttcanntttttttttttttttttttttttttttttt

SEQ ID NO: 3342 - DNA, 84 bp, synthetic construct
  source 1..84: mol_type = other DNA
tttttttaagcagtggtatcaacgcagagtacnnacgatcgannaggttcagnntttttttttttttttttttttttttttttt

SEQ ID NO: 3343 - DNA, 84 bp, synthetic construct
  source 1..84: mol_type = other DNA
tttttttaagcagtggtatcaacgcagagtacnnacgatcgannctagagcanntttttttttttttttttttttttttttttt

SEQ ID NO: 3344 - DNA, 84 bp, synthetic construct
  source 1..84: mol_type = other DNA
tttttttaagcagtggtatcaacgcagagtacnnacgatcganncttctagcnntttttttttttttttttttttttttttttt

SEQ ID NO: 3345 - DNA, 84 bp, synthetic construct
  source 1..84: mol_type = other DNA
tttttttaagcagtggtatcaacgcagagtacnnacgatcganngagtaacgnntttttttttttttttttttttttttttttt

SEQ ID NO: 3346 - DNA, 84 bp, synthetic construct
  source 1..84: mol_type = other DNA
tttttttaagcagtggtatcaacgcagagtacnnacgatcgannctaagaggnntttttttttttttttttttttttttttttt

SEQ ID NO: 3347 - DNA, 84 bp, synthetic construct
  source 1..84: mol_type = other DNA
tttttttaagcagtggtatcaacgcagagtacnnacgatcgannacgtgtagnntttttttttttttttttttttttttttttt

SEQ ID NO: 3348 - DNA, 84 bp, synthetic construct
  source 1..84: mol_type = other DNA
tttttttaagcagtggtatcaacgcagagtacnnacgatcgannactacaggnntttttttttttttttttttttttttttttt

SEQ ID NO: 3349 - DNA, 84 bp, synthetic construct
  source 1..84: mol_type = other DNA
tttttttaagcagtggtatcaacgcagagtacnnacgatcganntacaggtcnntttttttttttttttttttttttttttttt

SEQ ID NO: 3350 - DNA, 84 bp, synthetic construct
  source 1..84: mol_type = other DNA
tttttttaagcagtggtatcaacgcagagtacnnacgatcgannctcacatgnntttttttttttttttttttttttttttttt

SEQ ID NO: 3351 - DNA, 84 bp, synthetic construct
  source 1..84: mol_type = other DNA
tttttttaagcagtggtatcaacgcagagtacnnacgatcgannactaggagnntttttttttttttttttttttttttttttt

SEQ ID NO: 3352 - DNA, 84 bp, synthetic construct
  source 1..84: mol_type = other DNA
tttttttaagcagtggtatcaacgcagagtacnnacgatcgannccatagganntttttttttttttttttttttttttttttt

SEQ ID NO: 3353 - DNA, 84 bp, synthetic construct
  source 1..84: mol_type = other DNA
tttttttaagcagtggtatcaacgcagagtacnnacgatcgannggagaatcnntttttttttttttttttttttttttttttt

SEQ ID NO: 3354 - DNA, 84 bp, synthetic construct
  source 1..84: mol_type = other DNA
tttttttaagcagtggtatcaacgcagagtacnnacgatcganngccaagaanntttttttttttttttttttttttttttttt

SEQ ID NO: 3355 - DNA, 84 bp, synthetic construct
  source 1..84: mol_type = other DNA
tttttttaagcagtggtatcaacgcagagtacnnacgatcgannaaggcaagnntttttttttttttttttttttttttttttt

SEQ ID NO: 3356 - DNA, 84 bp, synthetic construct
  source 1..84: mol_type = other DNA
tttttttaagcagtggtatcaacgcagagtacnnacgatcgannaatgtcgcnntttttttttttttttttttttttttttttt

SEQ ID NO: 3357 - DNA, 84 bp, synthetic construct
  source 1..84: mol_type = other DNA
tttttttaagcagtggtatcaacgcagagtacnnacgatcgannatggaaccnntttttttttttttttttttttttttttttt

SEQ ID NO: 3358 - DNA, 84 bp, synthetic construct
  source 1..84: mol_type = other DNA
tttttttaagcagtggtatcaacgcagagtacnnacgatcgannagaggcatnntttttttttttttttttttttttttttttt

SEQ ID NO: 3359 - DNA, 84 bp, synthetic construct
  source 1..84: mol_type = other DNA
tttttttaagcagtggtatcaacgcagagtacnnacgatcganntgcatagcnntttttttttttttttttttttttttttttt

SEQ ID NO: 3360 - DNA, 84 bp, synthetic construct
  source 1..84: mol_type = other DNA
tttttttaagcagtggtatcaacgcagagtacnnacgatcgannctaacgganntttttttttttttttttttttttttttttt

SEQ ID NO: 3361 - DNA, 84 bp, synthetic construct
  source 1..84: mol_type = other DNA
tttttttaagcagtggtatcaacgcagagtacnnacgatcganntatcgaggnntttttttttttttttttttttttttttttt

SEQ ID NO: 3362 - DNA, 84 bp, synthetic construct
  source 1..84: mol_type = other DNA
tttttttaagcagtggtatcaacgcagagtacnnacgatcganncatagcctnntttttttttttttttttttttttttttttt

SEQ ID NO: 3363 - DNA, 84 bp, synthetic construct
  source 1..84: mol_type = other DNA
tttttttaagcagtggtatcaacgcagagtacnnacgatcgannatcgagacnntttttttttttttttttttttttttttttt

SEQ ID NO: 3364 - DNA, 84 bp, synthetic construct
  source 1..84: mol_type = other DNA
tttttttaagcagtggtatcaacgcagagtacnnacgatcgannggaagagtnntttttttttttttttttttttttttttttt

SEQ ID NO: 3365 - DNA, 84 bp, synthetic construct
  source 1..84: mol_type = other DNA
tttttttaagcagtggtatcaacgcagagtacnnacgatcgannccaagtagnntttttttttttttttttttttttttttttt

SEQ ID NO: 3366 - DNA, 84 bp, synthetic construct
  source 1..84: mol_type = other DNA
tttttttaagcagtggtatcaacgcagagtacnnacgatcgannctgaacagnntttttttttttttttttttttttttttttt

SEQ ID NO: 3367 - DNA, 84 bp, synthetic construct
  source 1..84: mol_type = other DNA
tttttttaagcagtggtatcaacgcagagtacnnacgatcganngtaggttcnntttttttttttttttttttttttttttttt

SEQ ID NO: 3368 - DNA, 84 bp, synthetic construct
  source 1..84: mol_type = other DNA
tttttttaagcagtggtatcaacgcagagtacnnacgatcganngtatggacnntttttttttttttttttttttttttttttt

SEQ ID NO: 3369 - DNA, 84 bp, synthetic construct
  source 1..84: mol_type = other DNA
tttttttaagcagtggtatcaacgcagagtacnnacgatcganntcgcaacanntttttttttttttttttttttttttttttt

SEQ ID NO: 3370 - DNA, 84 bp, synthetic construct
  source 1..84: mol_type = other DNA
tttttttaagcagtggtatcaacgcagagtacnnacgatcgannccgctaatnntttttttttttttttttttttttttttttt

SEQ ID NO: 3371 - DNA, 84 bp, synthetic construct
  source 1..84: mol_type = other DNA
tttttttaagcagtggtatcaacgcagagtacnnacgatcganngattcgcanntttttttttttttttttttttttttttttt

SEQ ID NO: 3372 - DNA, 84 bp, synthetic construct
  source 1..84: mol_type = other DNA
tttttttaagcagtggtatcaacgcagagtacnnacgatcganncgatggaanntttttttttttttttttttttttttttttt

SEQ ID NO: 3373 - DNA, 84 bp, synthetic construct
  source 1..84: mol_type = other DNA
tttttttaagcagtggtatcaacgcagagtacnnacgatcgannagcaagganntttttttttttttttttttttttttttttt

SEQ ID NO: 3374 - DNA, 84 bp, synthetic construct
  source 1..84: mol_type = other DNA
tttttttaagcagtggtatcaacgcagagtacnnacgatcganncgtagcaanntttttttttttttttttttttttttttttt

SEQ ID NO: 3375 - DNA, 84 bp, synthetic construct
  source 1..84: mol_type = other DNA
tttttttaagcagtggtatcaacgcagagtacnnacgatcganntggcagtanntttttttttttttttttttttttttttttt

SEQ ID NO: 3376 - DNA, 84 bp, synthetic construct
  source 1..84: mol_type = other DNA
tttttttaagcagtggtatcaacgcagagtacnnacgatcganncggtagttnntttttttttttttttttttttttttttttt

SEQ ID NO: 3377 - DNA, 84 bp, synthetic construct
  source 1..84: mol_type = other DNA
tttttttaagcagtggtatcaacgcagagtacnnacgatcganntgacttcgnntttttttttttttttttttttttttttttt

SEQ ID NO: 3378 - DNA, 84 bp, synthetic construct
  source 1..84: mol_type = other DNA
tttttttaagcagtggtatcaacgcagagtacnnacgatcganngagtgcaanntttttttttttttttttttttttttttttt

SEQ ID NO: 3379 - DNA, 84 bp, synthetic construct
  source 1..84: mol_type = other DNA
tttttttaagcagtggtatcaacgcagagtacnnacgatcgannacggtaacnntttttttttttttttttttttttttttttt

SEQ ID NO: 3380 - DNA, 84 bp, synthetic construct
  source 1..84: mol_type = other DNA
tttttttaagcagtggtatcaacgcagagtacnnacgatcgannaagtggtgnntttttttttttttttttttttttttttttt

SEQ ID NO: 3381 - DNA, 84 bp, synthetic construct
  source 1..84: mol_type = other DNA
tttttttaagcagtggtatcaacgcagagtacnnacgatcgannggagacaanntttttttttttttttttttttttttttttt

SEQ ID NO: 3382 - DNA, 84 bp, synthetic construct
  source 1..84: mol_type = other DNA
tttttttaagcagtggtatcaacgcagagtacnnacgatcganntcaaggacnntttttttttttttttttttttttttttttt

SEQ ID NO: 3383 - DNA, 84 bp, synthetic construct
  source 1..84: mol_type = other DNA
tttttttaagcagtggtatcaacgcagagtacnnacgatcgannaagagagcnntttttttttttttttttttttttttttttt

SEQ ID NO: 3384 - DNA, 84 bp, synthetic construct
  source 1..84: mol_type = other DNA
tttttttaagcagtggtatcaacgcagagtacnnacgatcganncgagagatnntttttttttttttttttttttttttttttt

SEQ ID NO: 3385 - DNA, 84 bp, synthetic construct
  source 1..84: mol_type = other DNA
tttttttaagcagtggtatcaacgcagagtacnnacgatcgannacagatggnntttttttttttttttttttttttttttttt

SEQ ID NO: 3386 - DNA, 84 bp, synthetic construct
  source 1..84: mol_type = other DNA
tttttttaagcagtggtatcaacgcagagtacnnacgatcgannaggagtcanntttttttttttttttttttttttttttttt

SEQ ID NO: 3387 - DNA, 84 bp, synthetic construct
  source 1..84: mol_type = other DNA
tttttttaagcagtggtatcaacgcagagtacnnacgatcganncgtgttacnntttttttttttttttttttttttttttttt

SEQ ID NO: 3388 - DNA, 84 bp, synthetic construct
  source 1..84: mol_type = other DNA
tttttttaagcagtggtatcaacgcagagtacnnacgatcganntagtgtgcnntttttttttttttttttttttttttttttt

SEQ ID NO: 3389 - DNA, 84 bp, synthetic construct
  source 1..84: mol_type = other DNA
tttttttaagcagtggtatcaacgcagagtacnnacgatcgannctcatgacnntttttttttttttttttttttttttttttt

SEQ ID NO: 3390 - DNA, 84 bp, synthetic construct
  source 1..84: mol_type = other DNA
tttttttaagcagtggtatcaacgcagagtacnnacgatcganngtatccagnntttttttttttttttttttttttttttttt

SEQ ID NO: 3391 - DNA, 84 bp, synthetic construct
  source 1..84: mol_type = other DNA
tttttttaagcagtggtatcaacgcagagtacnnacgatcgannacgcctatnntttttttttttttttttttttttttttttt

SEQ ID NO: 3392 - DNA, 84 bp, synthetic construct
  source 1..84: mol_type = other DNA
tttttttaagcagtggtatcaacgcagagtacnnacgatcgannaacgacctnntttttttttttttttttttttttttttttt

SEQ ID NO: 3393 - DNA, 84 bp, synthetic construct
  source 1..84: mol_type = other DNA
tttttttaagcagtggtatcaacgcagagtacnnacgatcgannatcaggctnntttttttttttttttttttttttttttttt

SEQ ID NO: 3394 - DNA, 84 bp, synthetic construct
  source 1..84: mol_type = other DNA
tttttttaagcagtggtatcaacgcagagtacnnacgatcganncaagttcgnntttttttttttttttttttttttttttttt

SEQ ID NO: 3395 - DNA, 84 bp, synthetic construct
  source 1..84: mol_type = other DNA
tttttttaagcagtggtatcaacgcagagtacnnacgatcganntagccaganntttttttttttttttttttttttttttttt

SEQ ID NO: 3396 - DNA, 84 bp, synthetic construct
  source 1..84: mol_type = other DNA
tttttttaagcagtggtatcaacgcagagtacnnacgatcganncaatcacgnntttttttttttttttttttttttttttttt

SEQ ID NO: 3397 - DNA, 84 bp, synthetic construct
  source 1..84: mol_type = other DNA
tttttttaagcagtggtatcaacgcagagtacnnacgatcganngcaacaagnntttttttttttttttttttttttttttttt

SEQ ID NO: 3398 - DNA, 84 bp, synthetic construct
  source 1..84: mol_type = other DNA
tttttttaagcagtggtatcaacgcagagtacnnacgatcganncacgacaanntttttttttttttttttttttttttttttt

SEQ ID NO: 3399 - DNA, 84 bp, synthetic construct
  source 1..84: mol_type = other DNA
tttttttaagcagtggtatcaacgcagagtacnnacgatcganntacggaganntttttttttttttttttttttttttttttt

SEQ ID NO: 3400 - DNA, 84 bp, synthetic construct
  source 1..84: mol_type = other DNA
tttttttaagcagtggtatcaacgcagagtacnnacgatcganncgacaaganntttttttttttttttttttttttttttttt

SEQ ID NO: 3401 - DNA, 84 bp, synthetic construct
  source 1..84: mol_type = other DNA
tttttttaagcagtggtatcaacgcagagtacnnacgatcganncgaagtganntttttttttttttttttttttttttttttt

SEQ ID NO: 3402 - DNA, 84 bp, synthetic construct
  source 1..84: mol_type = other DNA
tttttttaagcagtggtatcaacgcagagtacnnacgatcgannagctggtanntttttttttttttttttttttttttttttt

SEQ ID NO: 3403 - DNA, 84 bp, synthetic construct
  source 1..84: mol_type = other DNA
tttttttaagcagtggtatcaacgcagagtacnnacgatcgannaactaggcnntttttttttttttttttttttttttttttt

SEQ ID NO: 3404 - DNA, 84 bp, synthetic construct
  source 1..84: mol_type = other DNA
tttttttaagcagtggtatcaacgcagagtacnnacgatcganncagcaagtnntttttttttttttttttttttttttttttt

SEQ ID NO: 3405 - DNA, 84 bp, synthetic construct
  source 1..84: mol_type = other DNA
tttttttaagcagtggtatcaacgcagagtacnnacgatcgannacgaggtanntttttttttttttttttttttttttttttt

SEQ ID NO: 3406 - DNA, 84 bp, synthetic construct
  source 1..84: mol_type = other DNA
tttttttaagcagtggtatcaacgcagagtacnnacgatcganncatcttccnntttttttttttttttttttttttttttttt

SEQ ID NO: 3407 - DNA, 84 bp, synthetic construct
  source 1..84: mol_type = other DNA
tttttttaagcagtggtatcaacgcagagtacnnacgatcganncctgaatcnntttttttttttttttttttttttttttttt

SEQ ID NO: 3408 - DNA, 84 bp, synthetic construct
  source 1..84: mol_type = other DNA
tttttttaagcagtggtatcaacgcagagtacnnacgatcganntgcagactnntttttttttttttttttttttttttttttt

SEQ ID NO: 3409 - DNA, 84 bp, synthetic construct
  source 1..84: mol_type = other DNA
tttttttaagcagtggtatcaacgcagagtacnnacgatcgannagatgtggnntttttttttttttttttttttttttttttt

SEQ ID NO: 3410 - DNA, 84 bp, synthetic construct
  source 1..84: mol_type = other DNA
tttttttaagcagtggtatcaacgcagagtacnnacgatcgannagttcgacnntttttttttttttttttttttttttttttt

SEQ ID NO: 3411 - DNA, 84 bp, synthetic construct
  source 1..84: mol_type = other DNA
tttttttaagcagtggtatcaacgcagagtacnnacgatcgannacaacctcnntttttttttttttttttttttttttttttt

SEQ ID NO: 3412 - DNA, 84 bp, synthetic construct
  source 1..84: mol_type = other DNA
tttttttaagcagtggtatcaacgcagagtacnnacgatcganncatggtagnntttttttttttttttttttttttttttttt

SEQ ID NO: 3413 - DNA, 84 bp, synthetic construct
  source 1..84: mol_type = other DNA
tttttttaagcagtggtatcaacgcagagtacnnacgatcganncgtatctcnntttttttttttttttttttttttttttttt

SEQ ID NO: 3414 - DNA, 84 bp, synthetic construct
  source 1..84: mol_type = other DNA
tttttttaagcagtggtatcaacgcagagtacnnacgatcganncctagttcnntttttttttttttttttttttttttttttt

SEQ ID NO: 3415 - DNA, 84 bp, synthetic construct
  source 1..84: mol_type = other DNA
tttttttaagcagtggtatcaacgcagagtacnnacgatcganncaagagtcnntttttttttttttttttttttttttttttt

SEQ ID NO: 3416 - DNA, 84 bp, synthetic construct
  source 1..84: mol_type = other DNA
tttttttaagcagtggtatcaacgcagagtacnnagaatcggnnaatcggcanntttttttttttttttttttttttttttttt

SEQ ID NO: 3417 - DNA, 84 bp, synthetic construct
  source 1..84: mol_type = other DNA
tttttttaagcagtggtatcaacgcagagtacnnagaatcggnntacggcatnntttttttttttttttttttttttttttttt

SEQ ID NO: 3418 - DNA, 84 bp, synthetic construct
  source 1..84: mol_type = other DNA
tttttttaagcagtggtatcaacgcagagtacnnagaatcggnnttggatcgnntttttttttttttttttttttttttttttt

SEQ ID NO: 3419 - DNA, 84 bp, synthetic construct
  source 1..84: mol_type = other DNA
tttttttaagcagtggtatcaacgcagagtacnnagaatcggnntggaacganntttttttttttttttttttttttttttttt

SEQ ID NO: 3420 - DNA, 84 bp, synthetic construct
  source 1..84: mol_type = other DNA
tttttttaagcagtggtatcaacgcagagtacnnagaatcggnnggcaatcanntttttttttttttttttttttttttttttt

SEQ ID NO: 3421 - DNA, 84 bp, synthetic construct
  source 1..84: mol_type = other DNA
tttttttaagcagtggtatcaacgcagagtacnnagaatcggnngaatccganntttttttttttttttttttttttttttttt

SEQ ID NO: 3422 - DNA, 84 bp, synthetic construct
  source 1..84: mol_type = other DNA
tttttttaagcagtggtatcaacgcagagtacnnagaatcggnnttacggtgnntttttttttttttttttttttttttttttt

SEQ ID NO: 3423 - DNA, 84 bp, synthetic construct
  source 1..84: mol_type = other DNA
tttttttaagcagtggtatcaacgcagagtacnnagaatcggnncatatcggnntttttttttttttttttttttttttttttt

SEQ ID NO: 3424 - DNA, 84 bp, synthetic construct
  source 1..84: mol_type = other DNA
tttttttaagcagtggtatcaacgcagagtacnnagaatcggnncttcggtanntttttttttttttttttttttttttttttt

SEQ ID NO: 3425 - DNA, 84 bp, synthetic construct
  source 1..84: mol_type = other DNA
tttttttaagcagtggtatcaacgcagagtacnnagaatcggnntcctaacgnntttttttttttttttttttttttttttttt

SEQ ID NO: 3426 - DNA, 84 bp, synthetic construct
  source 1..84: mol_type = other DNA
tttttttaagcagtggtatcaacgcagagtacnnagaatcggnngtaagccanntttttttttttttttttttttttttttttt

SEQ ID NO: 3427 - DNA, 84 bp, synthetic construct
  source 1..84: mol_type = other DNA
tttttttaagcagtggtatcaacgcagagtacnnagaatcggnntaaggtggnntttttttttttttttttttttttttttttt

SEQ ID NO: 3428 - DNA, 84 bp, synthetic construct
  source 1..84: mol_type = other DNA
tttttttaagcagtggtatcaacgcagagtacnnagaatcggnnggtaagctnntttttttttttttttttttttttttttttt

SEQ ID NO: 3429 - DNA, 84 bp, synthetic construct
  source 1..84: mol_type = other DNA
tttttttaagcagtggtatcaacgcagagtacnnagaatcggnntgtgtcganntttttttttttttttttttttttttttttt

SEQ ID NO: 3430 - DNA, 84 bp, synthetic construct
  source 1..84: mol_type = other DNA
tttttttaagcagtggtatcaacgcagagtacnnagaatcggnngagcatganntttttttttttttttttttttttttttttt

SEQ ID NO: 3431 - DNA, 84 bp, synthetic construct
  source 1..84: mol_type = other DNA
tttttttaagcagtggtatcaacgcagagtacnnagaatcggnntcgaagtcnntttttttttttttttttttttttttttttt

SEQ ID NO: 3432 - DNA, 84 bp, synthetic construct
  source 1..84: mol_type = other DNA
tttttttaagcagtggtatcaacgcagagtacnnagaatcggnnggtgaacanntttttttttttttttttttttttttttttt

SEQ ID NO: 3433 - DNA, 84 bp, synthetic construct
  source 1..84: mol_type = other DNA
tttttttaagcagtggtatcaacgcagagtacnnagaatcggnnacatgcacnntttttttttttttttttttttttttttttt

SEQ ID NO: 3434 - DNA, 84 bp, synthetic construct
  source 1..84: mol_type = other DNA
tttttttaagcagtggtatcaacgcagagtacnnagaatcggnnccaacagtnntttttttttttttttttttttttttttttt

SEQ ID NO: 3435 - DNA, 84 bp, synthetic construct
  source 1..84: mol_type = other DNA
tttttttaagcagtggtatcaacgcagagtacnnagaatcggnnagaacagcnntttttttttttttttttttttttttttttt

SEQ ID NO: 3436 - DNA, 84 bp, synthetic construct
  source 1..84: mol_type = other DNA
tttttttaagcagtggtatcaacgcagagtacnnagaatcggnngaacacgtnntttttttttttttttttttttttttttttt

SEQ ID NO: 3437 - DNA, 84 bp, synthetic construct
  source 1..84: mol_type = other DNA
tttttttaagcagtggtatcaacgcagagtacnnagaatcggnnggtcttcanntttttttttttttttttttttttttttttt

SEQ ID NO: 3438 - DNA, 84 bp, synthetic construct
  source 1..84: mol_type = other DNA
tttttttaagcagtggtatcaacgcagagtacnnagaatcggnnaggttcagnntttttttttttttttttttttttttttttt

SEQ ID NO: 3439 - DNA, 84 bp, synthetic construct
  source 1..84: mol_type = other DNA
tttttttaagcagtggtatcaacgcagagtacnnagaatcggnnctagagcanntttttttttttttttttttttttttttttt

SEQ ID NO: 3440 - DNA, 84 bp, synthetic construct
  source 1..84: mol_type = other DNA
tttttttaagcagtggtatcaacgcagagtacnnagaatcggnncttctagcnntttttttttttttttttttttttttttttt

SEQ ID NO: 3441 - DNA, 84 bp, synthetic construct
  source 1..84: mol_type = other DNA
tttttttaagcagtggtatcaacgcagagtacnnagaatcggnngagtaacgnntttttttttttttttttttttttttttttt

SEQ ID NO: 3442 - DNA, 84 bp, synthetic construct
  source 1..84: mol_type = other DNA
tttttttaagcagtggtatcaacgcagagtacnnagaatcggnnctaagaggnntttttttttttttttttttttttttttttt

SEQ ID NO: 3443 - DNA, 84 bp, synthetic construct
  source 1..84: mol_type = other DNA
tttttttaagcagtggtatcaacgcagagtacnnagaatcggnnacgtgtagnntttttttttttttttttttttttttttttt

SEQ ID NO: 3444 - DNA, 84 bp, synthetic construct
  source 1..84: mol_type = other DNA
tttttttaagcagtggtatcaacgcagagtacnnagaatcggnnactacaggnntttttttttttttttttttttttttttttt

SEQ ID NO: 3445 - DNA, 84 bp, synthetic construct
  source 1..84: mol_type = other DNA
tttttttaagcagtggtatcaacgcagagtacnnagaatcggnntacaggtcnntttttttttttttttttttttttttttttt

SEQ ID NO: 3446 - DNA, 84 bp, synthetic construct
  source 1..84: mol_type = other DNA
tttttttaagcagtggtatcaacgcagagtacnnagaatcggnnctcacatgnntttttttttttttttttttttttttttttt

SEQ ID NO: 3447 - DNA, 84 bp, synthetic construct
  source 1..84: mol_type = other DNA
tttttttaagcagtggtatcaacgcagagtacnnagaatcggnnactaggagnntttttttttttttttttttttttttttttt

SEQ ID NO: 3448 - DNA, 84 bp, synthetic construct
  source 1..84: mol_type = other DNA
tttttttaagcagtggtatcaacgcagagtacnnagaatcggnnccatagganntttttttttttttttttttttttttttttt

SEQ ID NO: 3449 - DNA, 84 bp, synthetic construct
  source 1..84: mol_type = other DNA
tttttttaagcagtggtatcaacgcagagtacnnagaatcggnnggagaatcnntttttttttttttttttttttttttttttt

SEQ ID NO: 3450 - DNA, 84 bp, synthetic construct
  source 1..84: mol_type = other DNA
tttttttaagcagtggtatcaacgcagagtacnnagaatcggnngccaagaanntttttttttttttttttttttttttttttt

SEQ ID NO: 3451 - DNA, 84 bp, synthetic construct
  source 1..84: mol_type = other DNA
tttttttaagcagtggtatcaacgcagagtacnnagaatcggnnaaggcaagnntttttttttttttttttttttttttttttt

SEQ ID NO: 3452 - DNA, 84 bp, synthetic construct
  source 1..84: mol_type = other DNA
tttttttaagcagtggtatcaacgcagagtacnnagaatcggnnaatgtcgcnntttttttttttttttttttttttttttttt

SEQ ID NO: 3453 - DNA, 84 bp, synthetic construct
  source 1..84: mol_type = other DNA
tttttttaagcagtggtatcaacgcagagtacnnagaatcggnnatggaaccnntttttttttttttttttttttttttttttt

SEQ ID NO: 3454 - DNA, 84 bp, synthetic construct
  source 1..84: mol_type = other DNA
tttttttaagcagtggtatcaacgcagagtacnnagaatcggnnagaggcatnntttttttttttttttttttttttttttttt

SEQ ID NO: 3455 - DNA, 84 bp, synthetic construct
  source 1..84: mol_type = other DNA
tttttttaagcagtggtatcaacgcagagtacnnagaatcggnntgcatagcnntttttttttttttttttttttttttttttt

SEQ ID NO: 3456 - DNA, 84 bp, synthetic construct
  source 1..84: mol_type = other DNA
tttttttaagcagtggtatcaacgcagagtacnnagaatcggnnctaacgganntttttttttttttttttttttttttttttt

SEQ ID NO: 3457 - DNA, 84 bp, synthetic construct
  source 1..84: mol_type = other DNA
tttttttaagcagtggtatcaacgcagagtacnnagaatcggnntatcgaggnntttttttttttttttttttttttttttttt

SEQ ID NO: 3458 - DNA, 84 bp, synthetic construct
  source 1..84: mol_type = other DNA
tttttttaagcagtggtatcaacgcagagtacnnagaatcggnncatagcctnntttttttttttttttttttttttttttttt

SEQ ID NO: 3459 - DNA, 84 bp, synthetic construct
  source 1..84: mol_type = other DNA
tttttttaagcagtggtatcaacgcagagtacnnagaatcggnnatcgagacnntttttttttttttttttttttttttttttt

SEQ ID NO: 3460 - DNA, 84 bp, synthetic construct
  source 1..84: mol_type = other DNA
tttttttaagcagtggtatcaacgcagagtacnnagaatcggnnggaagagtnntttttttttttttttttttttttttttttt

SEQ ID NO: 3461 - DNA, 84 bp, synthetic construct
  source 1..84: mol_type = other DNA
tttttttaagcagtggtatcaacgcagagtacnnagaatcggnnccaagtagnntttttttttttttttttttttttttttttt

SEQ ID NO: 3462 - DNA, 84 bp, synthetic construct
  source 1..84: mol_type = other DNA
tttttttaagcagtggtatcaacgcagagtacnnagaatcggnnctgaacagnntttttttttttttttttttttttttttttt

SEQ ID NO: 3463 - DNA, 84 bp, synthetic construct
  source 1..84: mol_type = other DNA
tttttttaagcagtggtatcaacgcagagtacnnagaatcggnngtaggttcnntttttttttttttttttttttttttttttt

SEQ ID NO: 3464 - DNA, 84 bp, synthetic construct
  source 1..84: mol_type = other DNA
tttttttaagcagtggtatcaacgcagagtacnnagaatcggnngtatggacnntttttttttttttttttttttttttttttt

SEQ ID NO: 3465 - DNA, 84 bp, synthetic construct
  source 1..84: mol_type = other DNA
tttttttaagcagtggtatcaacgcagagtacnnagaatcggnntcgcaacanntttttttttttttttttttttttttttttt

SEQ ID NO: 3466 - DNA, 84 bp, synthetic construct
  source 1..84: mol_type = other DNA
tttttttaagcagtggtatcaacgcagagtacnnagaatcggnnccgctaatnntttttttttttttttttttttttttttttt

SEQ ID NO: 3467 - DNA, 84 bp, synthetic construct
  source 1..84: mol_type = other DNA
tttttttaagcagtggtatcaacgcagagtacnnagaatcggnngattcgcanntttttttttttttttttttttttttttttt

SEQ ID NO: 3468 - DNA, 84 bp, synthetic construct
  source 1..84: mol_type = other DNA
tttttttaagcagtggtatcaacgcagagtacnnagaatcggnncgatggaanntttttttttttttttttttttttttttttt

SEQ ID NO: 3469 - DNA, 84 bp, synthetic construct
  source 1..84: mol_type = other DNA
tttttttaagcagtggtatcaacgcagagtacnnagaatcggnnagcaagganntttttttttttttttttttttttttttttt

SEQ ID NO: 3470 - DNA, 84 bp, synthetic construct
  source 1..84: mol_type = other DNA
tttttttaagcagtggtatcaacgcagagtacnnagaatcggnncgtagcaanntttttttttttttttttttttttttttttt

SEQ ID NO: 3471 - DNA, 84 bp, synthetic construct
  source 1..84: mol_type = other DNA
tttttttaagcagtggtatcaacgcagagtacnnagaatcggnntggcagtanntttttttttttttttttttttttttttttt

SEQ ID NO: 3472 - DNA, 84 bp, synthetic construct
  source 1..84: mol_type = other DNA
tttttttaagcagtggtatcaacgcagagtacnnagaatcggnncggtagttnntttttttttttttttttttttttttttttt

SEQ ID NO: 3473 - DNA, 84 bp, synthetic construct
  source 1..84: mol_type = other DNA
tttttttaagcagtggtatcaacgcagagtacnnagaatcggnntgacttcgnntttttttttttttttttttttttttttttt

SEQ ID NO: 3474 - DNA, 84 bp, synthetic construct
  source 1..84: mol_type = other DNA
tttttttaagcagtggtatcaacgcagagtacnnagaatcggnngagtgcaanntttttttttttttttttttttttttttttt

SEQ ID NO: 3475 - DNA, 84 bp, synthetic construct
  source 1..84: mol_type = other DNA
tttttttaagcagtggtatcaacgcagagtacnnagaatcggnnacggtaacnntttttttttttttttttttttttttttttt

SEQ ID NO: 3476 - DNA, 84 bp, synthetic construct
  source 1..84: mol_type = other DNA
tttttttaagcagtggtatcaacgcagagtacnnagaatcggnnaagtggtgnntttttttttttttttttttttttttttttt

SEQ ID NO: 3477 - DNA, 84 bp, synthetic construct
  source 1..84: mol_type = other DNA
tttttttaagcagtggtatcaacgcagagtacnnagaatcggnnggagacaanntttttttttttttttttttttttttttttt

SEQ ID NO: 3478 - DNA, 84 bp, synthetic construct
  source 1..84: mol_type = other DNA
tttttttaagcagtggtatcaacgcagagtacnnagaatcggnntcaaggacnntttttttttttttttttttttttttttttt

SEQ ID NO: 3479 - DNA, 84 bp, synthetic construct
  source 1..84: mol_type = other DNA
tttttttaagcagtggtatcaacgcagagtacnnagaatcggnnaagagagcnntttttttttttttttttttttttttttttt

SEQ ID NO: 3480 - DNA, 84 bp, synthetic construct
  source 1..84: mol_type = other DNA
tttttttaagcagtggtatcaacgcagagtacnnagaatcggnncgagagatnntttttttttttttttttttttttttttttt

SEQ ID NO: 3481 - DNA, 84 bp, synthetic construct
  source 1..84: mol_type = other DNA
tttttttaagcagtggtatcaacgcagagtacnnagaatcggnnacagatggnntttttttttttttttttttttttttttttt

SEQ ID NO: 3482 - DNA, 84 bp, synthetic construct
  source 1..84: mol_type = other DNA
tttttttaagcagtggtatcaacgcagagtacnnagaatcggnnaggagtcanntttttttttttttttttttttttttttttt

SEQ ID NO: 3483 - DNA, 84 bp, synthetic construct
  source 1..84: mol_type = other DNA
tttttttaagcagtggtatcaacgcagagtacnnagaatcggnncgtgttacnntttttttttttttttttttttttttttttt

SEQ ID NO: 3484 - DNA, 84 bp, synthetic construct
  source 1..84: mol_type = other DNA
tttttttaagcagtggtatcaacgcagagtacnnagaatcggnntagtgtgcnntttttttttttttttttttttttttttttt

SEQ ID NO: 3485 - DNA, 84 bp, synthetic construct
  source 1..84: mol_type = other DNA
tttttttaagcagtggtatcaacgcagagtacnnagaatcggnnctcatgacnntttttttttttttttttttttttttttttt

SEQ ID NO: 3486 - DNA, 84 bp, synthetic construct
  source 1..84: mol_type = other DNA
tttttttaagcagtggtatcaacgcagagtacnnagaatcggnngtatccagnntttttttttttttttttttttttttttttt

SEQ ID NO: 3487 - DNA, 84 bp, synthetic construct
  source 1..84: mol_type = other DNA
tttttttaagcagtggtatcaacgcagagtacnnagaatcggnnacgcctatnntttttttttttttttttttttttttttttt

SEQ ID NO: 3488 - DNA, 84 bp, synthetic construct
  source 1..84: mol_type = other DNA
tttttttaagcagtggtatcaacgcagagtacnnagaatcggnnaacgacctnntttttttttttttttttttttttttttttt

SEQ ID NO: 3489 - DNA, 84 bp, synthetic construct
  source 1..84: mol_type = other DNA
tttttttaagcagtggtatcaacgcagagtacnnagaatcggnnatcaggctnntttttttttttttttttttttttttttttt

SEQ ID NO: 3490 - DNA, 84 bp, synthetic construct
  source 1..84: mol_type = other DNA
tttttttaagcagtggtatcaacgcagagtacnnagaatcggnncaagttcgnntttttttttttttttttttttttttttttt

SEQ ID NO: 3491 - DNA, 84 bp, synthetic construct
  source 1..84: mol_type = other DNA
tttttttaagcagtggtatcaacgcagagtacnnagaatcggnntagccaganntttttttttttttttttttttttttttttt

SEQ ID NO: 3492 - DNA, 84 bp, synthetic construct
  source 1..84: mol_type = other DNA
tttttttaagcagtggtatcaacgcagagtacnnagaatcggnncaatcacgnntttttttttttttttttttttttttttttt

SEQ ID NO: 3493 - DNA, 84 bp, synthetic construct
  source 1..84: mol_type = other DNA
tttttttaagcagtggtatcaacgcagagtacnnagaatcggnngcaacaagnntttttttttttttttttttttttttttttt

SEQ ID NO: 3494 - DNA, 84 bp, synthetic construct
  source 1..84: mol_type = other DNA
tttttttaagcagtggtatcaacgcagagtacnnagaatcggnncacgacaanntttttttttttttttttttttttttttttt

SEQ ID NO: 3495 - DNA, 84 bp, synthetic construct
  source 1..84: mol_type = other DNA
tttttttaagcagtggtatcaacgcagagtacnnagaatcggnntacggaganntttttttttttttttttttttttttttttt

SEQ ID NO: 3496 - DNA, 84 bp, synthetic construct
  source 1..84: mol_type = other DNA
tttttttaagcagtggtatcaacgcagagtacnnagaatcggnncgacaaganntttttttttttttttttttttttttttttt

SEQ ID NO: 3497 - DNA, 84 bp, synthetic construct
  source 1..84: mol_type = other DNA
tttttttaagcagtggtatcaacgcagagtacnnagaatcggnncgaagtganntttttttttttttttttttttttttttttt

SEQ ID NO: 3498 - DNA, 84 bp, synthetic construct
  source 1..84: mol_type = other DNA
tttttttaagcagtggtatcaacgcagagtacnnagaatcggnnagctggtanntttttttttttttttttttttttttttttt

SEQ ID NO: 3499 - DNA, 84 bp, synthetic construct
  source 1..84: mol_type = other DNA
tttttttaagcagtggtatcaacgcagagtacnnagaatcggnnaactaggcnntttttttttttttttttttttttttttttt

SEQ ID NO: 3500 - DNA, 84 bp, synthetic construct
  source 1..84: mol_type = other DNA
tttttttaagcagtggtatcaacgcagagtacnnagaatcggnncagcaagtnntttttttttttttttttttttttttttttt

SEQ ID NO: 3501 - DNA, 84 bp, synthetic construct
  source 1..84: mol_type = other DNA
tttttttaagcagtggtatcaacgcagagtacnnagaatcggnnacgaggtanntttttttttttttttttttttttttttttt

SEQ ID NO: 3502 - DNA, 84 bp, synthetic construct
  source 1..84: mol_type = other DNA
tttttttaagcagtggtatcaacgcagagtacnnagaatcggnncatcttccnntttttttttttttttttttttttttttttt

SEQ ID NO: 3503 - DNA, 84 bp, synthetic construct
  source 1..84: mol_type = other DNA
tttttttaagcagtggtatcaacgcagagtacnnagaatcggnncctgaatcnntttttttttttttttttttttttttttttt

SEQ ID NO: 3504 - DNA, 84 bp, synthetic construct
  source 1..84: mol_type = other DNA
tttttttaagcagtggtatcaacgcagagtacnnagaatcggnntgcagactnntttttttttttttttttttttttttttttt

SEQ ID NO: 3505 - DNA, 84 bp, synthetic construct
  source 1..84: mol_type = other DNA
tttttttaagcagtggtatcaacgcagagtacnnagaatcggnnagatgtggnntttttttttttttttttttttttttttttt

SEQ ID NO: 3506 - DNA, 84 bp, synthetic construct
  source 1..84: mol_type = other DNA
tttttttaagcagtggtatcaacgcagagtacnnagaatcggnnagttcgacnntttttttttttttttttttttttttttttt

SEQ ID NO: 3507 - DNA, 84 bp, synthetic construct
  source 1..84: mol_type = other DNA
tttttttaagcagtggtatcaacgcagagtacnnagaatcggnnacaacctcnntttttttttttttttttttttttttttttt

SEQ ID NO: 3508 - DNA, 84 bp, synthetic construct
  source 1..84: mol_type = other DNA
tttttttaagcagtggtatcaacgcagagtacnnagaatcggnncatggtagnntttttttttttttttttttttttttttttt

SEQ ID NO: 3509 - DNA, 84 bp, synthetic construct
  source 1..84: mol_type = other DNA
tttttttaagcagtggtatcaacgcagagtacnnagaatcggnncgtatctcnntttttttttttttttttttttttttttttt

SEQ ID NO: 3510 - DNA, 84 bp, synthetic construct
  source 1..84: mol_type = other DNA
tttttttaagcagtggtatcaacgcagagtacnnagaatcggnncctagttcnntttttttttttttttttttttttttttttt

SEQ ID NO: 3511 - DNA, 84 bp, synthetic construct
  source 1..84: mol_type = other DNA
tttttttaagcagtggtatcaacgcagagtacnnagaatcggnncaagagtcnntttttttttttttttttttttttttttttt

SEQ ID NO: 3512 - DNA, 84 bp, synthetic construct
  source 1..84: mol_type = other DNA
tttttttaagcagtggtatcaacgcagagtacnnggaatggannaatcggcanntttttttttttttttttttttttttttttt

SEQ ID NO: 3513 - DNA, 84 bp, synthetic construct
  source 1..84: mol_type = other DNA
tttttttaagcagtggtatcaacgcagagtacnnggaatgganntacggcatnntttttttttttttttttttttttttttttt

SEQ ID NO: 3514 - DNA, 84 bp, synthetic construct
  source 1..84: mol_type = other DNA
tttttttaagcagtggtatcaacgcagagtacnnggaatggannttggatcgnntttttttttttttttttttttttttttttt

SEQ ID NO: 3515 - DNA, 84 bp, synthetic construct
  source 1..84: mol_type = other DNA
tttttttaagcagtggtatcaacgcagagtacnnggaatgganntggaacganntttttttttttttttttttttttttttttt

SEQ ID NO: 3516 - DNA, 84 bp, synthetic construct
  source 1..84: mol_type = other DNA
tttttttaagcagtggtatcaacgcagagtacnnggaatggannggcaatcanntttttttttttttttttttttttttttttt

SEQ ID NO: 3517 - DNA, 84 bp, synthetic construct
  source 1..84: mol_type = other DNA
tttttttaagcagtggtatcaacgcagagtacnnggaatgganngaatccganntttttttttttttttttttttttttttttt

SEQ ID NO: 3518 - DNA, 84 bp, synthetic construct
  source 1..84: mol_type = other DNA
tttttttaagcagtggtatcaacgcagagtacnnggaatggannttacggtgnntttttttttttttttttttttttttttttt

SEQ ID NO: 3519 - DNA, 84 bp, synthetic construct
  source 1..84: mol_type = other DNA
tttttttaagcagtggtatcaacgcagagtacnnggaatgganncatatcggnntttttttttttttttttttttttttttttt

SEQ ID NO: 3520 - DNA, 84 bp, synthetic construct
  source 1..84: mol_type = other DNA
tttttttaagcagtggtatcaacgcagagtacnnggaatgganncttcggtanntttttttttttttttttttttttttttttt

SEQ ID NO: 3521 - DNA, 84 bp, synthetic construct
  source 1..84: mol_type = other DNA
tttttttaagcagtggtatcaacgcagagtacnnggaatgganntcctaacgnntttttttttttttttttttttttttttttt

SEQ ID NO: 3522 - DNA, 84 bp, synthetic construct
  source 1..84: mol_type = other DNA
tttttttaagcagtggtatcaacgcagagtacnnggaatgganngtaagccanntttttttttttttttttttttttttttttt

SEQ ID NO: 3523 - DNA, 84 bp, synthetic construct
  source 1..84: mol_type = other DNA
tttttttaagcagtggtatcaacgcagagtacnnggaatgganntaaggtggnntttttttttttttttttttttttttttttt

SEQ ID NO: 3524 - DNA, 84 bp, synthetic construct
  source 1..84: mol_type = other DNA
tttttttaagcagtggtatcaacgcagagtacnnggaatggannggtaagctnntttttttttttttttttttttttttttttt

SEQ ID NO: 3525 - DNA, 84 bp, synthetic construct
  source 1..84: mol_type = other DNA
tttttttaagcagtggtatcaacgcagagtacnnggaatgganntgtgtcganntttttttttttttttttttttttttttttt

SEQ ID NO: 3526 - DNA, 84 bp, synthetic construct
  source 1..84: mol_type = other DNA
tttttttaagcagtggtatcaacgcagagtacnnggaatgganngagcatganntttttttttttttttttttttttttttttt

SEQ ID NO: 3527 - DNA, 84 bp, synthetic construct
  source 1..84: mol_type = other DNA
tttttttaagcagtggtatcaacgcagagtacnnggaatgganntcgaagtcnntttttttttttttttttttttttttttttt

SEQ ID NO: 3528 - DNA, 84 bp, synthetic construct
  source 1..84: mol_type = other DNA
tttttttaagcagtggtatcaacgcagagtacnnggaatggannggtgaacanntttttttttttttttttttttttttttttt

SEQ ID NO: 3529 - DNA, 84 bp, synthetic construct
  source 1..84: mol_type = other DNA
tttttttaagcagtggtatcaacgcagagtacnnggaatggannacatgcacnntttttttttttttttttttttttttttttt

SEQ ID NO: 3530 - DNA, 84 bp, synthetic construct
  source 1..84: mol_type = other DNA
tttttttaagcagtggtatcaacgcagagtacnnggaatggannccaacagtnntttttttttttttttttttttttttttttt

SEQ ID NO: 3531 - DNA, 84 bp, synthetic construct
  source 1..84: mol_type = other DNA
tttttttaagcagtggtatcaacgcagagtacnnggaatggannagaacagcnntttttttttttttttttttttttttttttt

SEQ ID NO: 3532 - DNA, 84 bp, synthetic construct
  source 1..84: mol_type = other DNA
tttttttaagcagtggtatcaacgcagagtacnnggaatgganngaacacgtnntttttttttttttttttttttttttttttt

SEQ ID NO: 3533 - DNA, 84 bp, synthetic construct
  source 1..84: mol_type = other DNA
tttttttaagcagtggtatcaacgcagagtacnnggaatggannggtcttcanntttttttttttttttttttttttttttttt

SEQ ID NO: 3534 - DNA, 84 bp, synthetic construct
  source 1..84: mol_type = other DNA
tttttttaagcagtggtatcaacgcagagtacnnggaatggannaggttcagnntttttttttttttttttttttttttttttt

SEQ ID NO: 3535 - DNA, 84 bp, synthetic construct
  source 1..84: mol_type = other DNA
tttttttaagcagtggtatcaacgcagagtacnnggaatggannctagagcanntttttttttttttttttttttttttttttt

SEQ ID NO: 3536 - DNA, 84 bp, synthetic construct
  source 1..84: mol_type = other DNA
tttttttaagcagtggtatcaacgcagagtacnnggaatgganncttctagcnntttttttttttttttttttttttttttttt

SEQ ID NO: 3537 - DNA, 84 bp, synthetic construct
  source 1..84: mol_type = other DNA
tttttttaagcagtggtatcaacgcagagtacnnggaatgganngagtaacgnntttttttttttttttttttttttttttttt

SEQ ID NO: 3538 - DNA, 84 bp, synthetic construct
  source 1..84: mol_type = other DNA
tttttttaagcagtggtatcaacgcagagtacnnggaatggannctaagaggnntttttttttttttttttttttttttttttt

SEQ ID NO: 3539 - DNA, 84 bp, synthetic construct
  source 1..84: mol_type = other DNA
tttttttaagcagtggtatcaacgcagagtacnnggaatggannacgtgtagnntttttttttttttttttttttttttttttt

SEQ ID NO: 3540 - DNA, 84 bp, synthetic construct
  source 1..84: mol_type = other DNA
tttttttaagcagtggtatcaacgcagagtacnnggaatggannactacaggnntttttttttttttttttttttttttttttt

SEQ ID NO: 3541 - DNA, 84 bp, synthetic construct
  source 1..84: mol_type = other DNA
tttttttaagcagtggtatcaacgcagagtacnnggaatgganntacaggtcnntttttttttttttttttttttttttttttt

SEQ ID NO: 3542 - DNA, 84 bp, synthetic construct
  source 1..84: mol_type = other DNA
tttttttaagcagtggtatcaacgcagagtacnnggaatggannctcacatgnntttttttttttttttttttttttttttttt

SEQ ID NO: 3543 - DNA, 84 bp, synthetic construct
  source 1..84: mol_type = other DNA
tttttttaagcagtggtatcaacgcagagtacnnggaatggannactaggagnntttttttttttttttttttttttttttttt

SEQ ID NO: 3544 - DNA, 84 bp, synthetic construct
  source 1..84: mol_type = other DNA
tttttttaagcagtggtatcaacgcagagtacnnggaatggannccatagganntttttttttttttttttttttttttttttt

SEQ ID NO: 3545 - DNA, 84 bp, synthetic construct
  source 1..84: mol_type = other DNA
tttttttaagcagtggtatcaacgcagagtacnnggaatggannggagaatcnntttttttttttttttttttttttttttttt

SEQ ID NO: 3546 - DNA, 84 bp, synthetic construct
  source 1..84: mol_type = other DNA
tttttttaagcagtggtatcaacgcagagtacnnggaatgganngccaagaanntttttttttttttttttttttttttttttt

SEQ ID NO: 3547 - DNA, 84 bp, synthetic construct
  source 1..84: mol_type = other DNA
tttttttaagcagtggtatcaacgcagagtacnnggaatggannaaggcaagnntttttttttttttttttttttttttttttt

SEQ ID NO: 3548 - DNA, 84 bp, synthetic construct
  source 1..84: mol_type = other DNA
tttttttaagcagtggtatcaacgcagagtacnnggaatggannaatgtcgcnntttttttttttttttttttttttttttttt

SEQ ID NO: 3549 - DNA, 84 bp, synthetic construct
  source 1..84: mol_type = other DNA
tttttttaagcagtggtatcaacgcagagtacnnggaatggannatggaaccnntttttttttttttttttttttttttttttt

SEQ ID NO: 3550 - DNA, 84 bp, synthetic construct
  source 1..84: mol_type = other DNA
tttttttaagcagtggtatcaacgcagagtacnnggaatggannagaggcatnntttttttttttttttttttttttttttttt

SEQ ID NO: 3551 - DNA, 84 bp, synthetic construct
  source 1..84: mol_type = other DNA
tttttttaagcagtggtatcaacgcagagtacnnggaatgganntgcatagcnntttttttttttttttttttttttttttttt

SEQ ID NO: 3552 - DNA, 84 bp, synthetic construct
  source 1..84: mol_type = other DNA
tttttttaagcagtggtatcaacgcagagtacnnggaatggannctaacgganntttttttttttttttttttttttttttttt

SEQ ID NO: 3553 - DNA, 84 bp, synthetic construct
  source 1..84: mol_type = other DNA
tttttttaagcagtggtatcaacgcagagtacnnggaatgganntatcgaggnntttttttttttttttttttttttttttttt

SEQ ID NO: 3554 - DNA, 84 bp, synthetic construct
  source 1..84: mol_type = other DNA
tttttttaagcagtggtatcaacgcagagtacnnggaatgganncatagcctnntttttttttttttttttttttttttttttt

SEQ ID NO: 3555 - DNA, 84 bp, synthetic construct
  source 1..84: mol_type = other DNA
tttttttaagcagtggtatcaacgcagagtacnnggaatggannatcgagacnntttttttttttttttttttttttttttttt

SEQ ID NO: 3556 - DNA, 84 bp, synthetic construct
  source 1..84: mol_type = other DNA
tttttttaagcagtggtatcaacgcagagtacnnggaatggannggaagagtnntttttttttttttttttttttttttttttt

SEQ ID NO: 3557 - DNA, 84 bp, synthetic construct
  source 1..84: mol_type = other DNA
tttttttaagcagtggtatcaacgcagagtacnnggaatggannccaagtagnntttttttttttttttttttttttttttttt

SEQ ID NO: 3558 - DNA, 84 bp, synthetic construct
  source 1..84: mol_type = other DNA
tttttttaagcagtggtatcaacgcagagtacnnggaatggannctgaacagnntttttttttttttttttttttttttttttt

SEQ ID NO: 3559 - DNA, 84 bp, synthetic construct
  source 1..84: mol_type = other DNA
tttttttaagcagtggtatcaacgcagagtacnnggaatgganngtaggttcnntttttttttttttttttttttttttttttt

SEQ ID NO: 3560 - DNA, 84 bp, synthetic construct
  source 1..84: mol_type = other DNA
tttttttaagcagtggtatcaacgcagagtacnnggaatgganngtatggacnntttttttttttttttttttttttttttttt

SEQ ID NO: 3561 - DNA, 84 bp, synthetic construct
  source 1..84: mol_type = other DNA
tttttttaagcagtggtatcaacgcagagtacnnggaatgganntcgcaacanntttttttttttttttttttttttttttttt

SEQ ID NO: 3562 - DNA, 84 bp, synthetic construct
  source 1..84: mol_type = other DNA
tttttttaagcagtggtatcaacgcagagtacnnggaatggannccgctaatnntttttttttttttttttttttttttttttt

SEQ ID NO: 3563 - DNA, 84 bp, synthetic construct
  source 1..84: mol_type = other DNA
tttttttaagcagtggtatcaacgcagagtacnnggaatgganngattcgcanntttttttttttttttttttttttttttttt

SEQ ID NO: 3564 - DNA, 84 bp, synthetic construct
  source 1..84: mol_type = other DNA
tttttttaagcagtggtatcaacgcagagtacnnggaatgganncgatggaanntttttttttttttttttttttttttttttt

SEQ ID NO: 3565 - DNA, 84 bp, synthetic construct
  source 1..84: mol_type = other DNA
tttttttaagcagtggtatcaacgcagagtacnnggaatggannagcaagganntttttttttttttttttttttttttttttt

SEQ ID NO: 3566 - DNA, 84 bp, synthetic construct
  source 1..84: mol_type = other DNA
tttttttaagcagtggtatcaacgcagagtacnnggaatgganncgtagcaanntttttttttttttttttttttttttttttt

SEQ ID NO: 3567 - DNA, 84 bp, synthetic construct
  source 1..84: mol_type = other DNA
tttttttaagcagtggtatcaacgcagagtacnnggaatgganntggcagtanntttttttttttttttttttttttttttttt

SEQ ID NO: 3568 - DNA, 84 bp, synthetic construct
  source 1..84: mol_type = other DNA
tttttttaagcagtggtatcaacgcagagtacnnggaatgganncggtagttnntttttttttttttttttttttttttttttt

SEQ ID NO: 3569 - DNA, 84 bp, synthetic construct
  source 1..84: mol_type = other DNA
tttttttaagcagtggtatcaacgcagagtacnnggaatgganntgacttcgnntttttttttttttttttttttttttttttt

SEQ ID NO: 3570 - DNA, 84 bp, synthetic construct
  source 1..84: mol_type = other DNA
tttttttaagcagtggtatcaacgcagagtacnnggaatgganngagtgcaanntttttttttttttttttttttttttttttt

SEQ ID NO: 3571 - DNA, 84 bp, synthetic construct
  source 1..84: mol_type = other DNA
tttttttaagcagtggtatcaacgcagagtacnnggaatggannacggtaacnntttttttttttttttttttttttttttttt

SEQ ID NO: 3572 - DNA, 84 bp, synthetic construct
  source 1..84: mol_type = other DNA
tttttttaagcagtggtatcaacgcagagtacnnggaatggannaagtggtgnntttttttttttttttttttttttttttttt

SEQ ID NO: 3573 - DNA, 84 bp, synthetic construct
  source 1..84: mol_type = other DNA
tttttttaagcagtggtatcaacgcagagtacnnggaatggannggagacaanntttttttttttttttttttttttttttttt

SEQ ID NO: 3574 - DNA, 84 bp, synthetic construct
  source 1..84: mol_type = other DNA
tttttttaagcagtggtatcaacgcagagtacnnggaatgganntcaaggacnntttttttttttttttttttttttttttttt

SEQ ID NO: 3575 - DNA, 84 bp, synthetic construct
  source 1..84: mol_type = other DNA
tttttttaagcagtggtatcaacgcagagtacnnggaatggannaagagagcnntttttttttttttttttttttttttttttt

SEQ ID NO: 3576 - DNA, 84 bp, synthetic construct
  source 1..84: mol_type = other DNA
tttttttaagcagtggtatcaacgcagagtacnnggaatgganncgagagatnntttttttttttttttttttttttttttttt

SEQ ID NO: 3577 - DNA, 84 bp, synthetic construct
  source 1..84: mol_type = other DNA
tttttttaagcagtggtatcaacgcagagtacnnggaatggannacagatggnntttttttttttttttttttttttttttttt

SEQ ID NO: 3578 - DNA, 84 bp, synthetic construct
  source 1..84: mol_type = other DNA
tttttttaagcagtggtatcaacgcagagtacnnggaatggannaggagtcanntttttttttttttttttttttttttttttt

SEQ ID NO: 3579 - DNA, 84 bp, synthetic construct
  source 1..84: mol_type = other DNA
tttttttaagcagtggtatcaacgcagagtacnnggaatgganncgtgttacnntttttttttttttttttttttttttttttt

SEQ ID NO: 3580 - DNA, 84 bp, synthetic construct
  source 1..84: mol_type = other DNA
tttttttaagcagtggtatcaacgcagagtacnnggaatgganntagtgtgcnntttttttttttttttttttttttttttttt

SEQ ID NO: 3581 - DNA, 84 bp, synthetic construct
  source 1..84: mol_type = other DNA
tttttttaagcagtggtatcaacgcagagtacnnggaatggannctcatgacnntttttttttttttttttttttttttttttt

SEQ ID NO: 3582 - DNA, 84 bp, synthetic construct
  source 1..84: mol_type = other DNA
tttttttaagcagtggtatcaacgcagagtacnnggaatgganngtatccagnntttttttttttttttttttttttttttttt

SEQ ID NO: 3583 - DNA, 84 bp, synthetic construct
  source 1..84: mol_type = other DNA
tttttttaagcagtggtatcaacgcagagtacnnggaatggannacgcctatnntttttttttttttttttttttttttttttt

SEQ ID NO: 3584 - DNA, 84 bp, synthetic construct
  source 1..84: mol_type = other DNA
tttttttaagcagtggtatcaacgcagagtacnnggaatggannaacgacctnntttttttttttttttttttttttttttttt

SEQ ID NO: 3585 - DNA, 84 bp, synthetic construct
  source 1..84: mol_type = other DNA
tttttttaagcagtggtatcaacgcagagtacnnggaatggannatcaggctnntttttttttttttttttttttttttttttt

SEQ ID NO: 3586 - DNA, 84 bp, synthetic construct
  source 1..84: mol_type = other DNA
tttttttaagcagtggtatcaacgcagagtacnnggaatgganncaagttcgnntttttttttttttttttttttttttttttt

SEQ ID NO: 3587 - DNA, 84 bp, synthetic construct
  source 1..84: mol_type = other DNA
tttttttaagcagtggtatcaacgcagagtacnnggaatgganntagccaganntttttttttttttttttttttttttttttt

SEQ ID NO: 3588 - DNA, 84 bp, synthetic construct
  source 1..84: mol_type = other DNA
tttttttaagcagtggtatcaacgcagagtacnnggaatgganncaatcacgnntttttttttttttttttttttttttttttt

SEQ ID NO: 3589 - DNA, 84 bp, synthetic construct
  source 1..84: mol_type = other DNA
tttttttaagcagtggtatcaacgcagagtacnnggaatgganngcaacaagnntttttttttttttttttttttttttttttt

SEQ ID NO: 3590 - DNA, 84 bp, synthetic construct
  source 1..84: mol_type = other DNA
tttttttaagcagtggtatcaacgcagagtacnnggaatgganncacgacaanntttttttttttttttttttttttttttttt

SEQ ID NO: 3591 - DNA, 84 bp, synthetic construct
  source 1..84: mol_type = other DNA
tttttttaagcagtggtatcaacgcagagtacnnggaatgganntacggaganntttttttttttttttttttttttttttttt

SEQ ID NO: 3592 - DNA, 84 bp, synthetic construct
  source 1..84: mol_type = other DNA
tttttttaagcagtggtatcaacgcagagtacnnggaatgganncgacaaganntttttttttttttttttttttttttttttt

SEQ ID NO: 3593 - DNA, 84 bp, synthetic construct
  source 1..84: mol_type = other DNA
tttttttaagcagtggtatcaacgcagagtacnnggaatgganncgaagtganntttttttttttttttttttttttttttttt

SEQ ID NO: 3594 - DNA, 84 bp, synthetic construct
  source 1..84: mol_type = other DNA
tttttttaagcagtggtatcaacgcagagtacnnggaatggannagctggtanntttttttttttttttttttttttttttttt

SEQ ID NO: 3595 - DNA, 84 bp, synthetic construct
  source 1..84: mol_type = other DNA
tttttttaagcagtggtatcaacgcagagtacnnggaatggannaactaggcnntttttttttttttttttttttttttttttt

SEQ ID NO: 3596 - DNA, 84 bp, synthetic construct
  source 1..84: mol_type = other DNA
tttttttaagcagtggtatcaacgcagagtacnnggaatgganncagcaagtnntttttttttttttttttttttttttttttt

SEQ ID NO: 3597 - DNA, 84 bp, synthetic construct
  source 1..84: mol_type = other DNA
tttttttaagcagtggtatcaacgcagagtacnnggaatggannacgaggtanntttttttttttttttttttttttttttttt

SEQ ID NO: 3598 - DNA, 84 bp, synthetic construct
  source 1..84: mol_type = other DNA
tttttttaagcagtggtatcaacgcagagtacnnggaatgganncatcttccnntttttttttttttttttttttttttttttt

SEQ ID NO: 3599 - DNA, 84 bp, synthetic construct
  source 1..84: mol_type = other DNA
tttttttaagcagtggtatcaacgcagagtacnnggaatgganncctgaatcnntttttttttttttttttttttttttttttt

SEQ ID NO: 3600 - DNA, 84 bp, synthetic construct
  source 1..84: mol_type = other DNA
tttttttaagcagtggtatcaacgcagagtacnnggaatgganntgcagactnntttttttttttttttttttttttttttttt

SEQ ID NO: 3601 - DNA, 84 bp, synthetic construct
  source 1..84: mol_type = other DNA
tttttttaagcagtggtatcaacgcagagtacnnggaatggannagatgtggnntttttttttttttttttttttttttttttt

SEQ ID NO: 3602 - DNA, 84 bp, synthetic construct
  source 1..84: mol_type = other DNA
tttttttaagcagtggtatcaacgcagagtacnnggaatggannagttcgacnntttttttttttttttttttttttttttttt

SEQ ID NO: 3603 - DNA, 84 bp, synthetic construct
  source 1..84: mol_type = other DNA
tttttttaagcagtggtatcaacgcagagtacnnggaatggannacaacctcnntttttttttttttttttttttttttttttt

SEQ ID NO: 3604 - DNA, 84 bp, synthetic construct
  source 1..84: mol_type = other DNA
tttttttaagcagtggtatcaacgcagagtacnnggaatgganncatggtagnntttttttttttttttttttttttttttttt

SEQ ID NO: 3605 - DNA, 84 bp, synthetic construct
  source 1..84: mol_type = other DNA
tttttttaagcagtggtatcaacgcagagtacnnggaatgganncgtatctcnntttttttttttttttttttttttttttttt

SEQ ID NO: 3606 - DNA, 84 bp, synthetic construct
  source 1..84: mol_type = other DNA
tttttttaagcagtggtatcaacgcagagtacnnggaatgganncctagttcnntttttttttttttttttttttttttttttt

SEQ ID NO: 3607 - DNA, 84 bp, synthetic construct
  source 1..84: mol_type = other DNA
tttttttaagcagtggtatcaacgcagagtacnnggaatgganncaagagtcnntttttttttttttttttttttttttttttt

SEQ ID NO: 3608 - DNA, 84 bp, synthetic construct
  source 1..84: mol_type = other DNA
tttttttaagcagtggtatcaacgcagagtacnnccgtattgnnaatcggcanntttttttttttttttttttttttttttttt

SEQ ID NO: 3609 - DNA, 84 bp, synthetic construct
  source 1..84: mol_type = other DNA
tttttttaagcagtggtatcaacgcagagtacnnccgtattgnntacggcatnntttttttttttttttttttttttttttttt

SEQ ID NO: 3610 - DNA, 84 bp, synthetic construct
  source 1..84: mol_type = other DNA
tttttttaagcagtggtatcaacgcagagtacnnccgtattgnnttggatcgnntttttttttttttttttttttttttttttt

SEQ ID NO: 3611 - DNA, 84 bp, synthetic construct
  source 1..84: mol_type = other DNA
tttttttaagcagtggtatcaacgcagagtacnnccgtattgnntggaacganntttttttttttttttttttttttttttttt

SEQ ID NO: 3612 - DNA, 84 bp, synthetic construct
  source 1..84: mol_type = other DNA
tttttttaagcagtggtatcaacgcagagtacnnccgtattgnnggcaatcanntttttttttttttttttttttttttttttt

SEQ ID NO: 3613 - DNA, 84 bp, synthetic construct
  source 1..84: mol_type = other DNA
tttttttaagcagtggtatcaacgcagagtacnnccgtattgnngaatccganntttttttttttttttttttttttttttttt

SEQ ID NO: 3614 - DNA, 84 bp, synthetic construct
  source 1..84: mol_type = other DNA
tttttttaagcagtggtatcaacgcagagtacnnccgtattgnnttacggtgnntttttttttttttttttttttttttttttt

SEQ ID NO: 3615 - DNA, 84 bp, synthetic construct
  source 1..84: mol_type = other DNA
tttttttaagcagtggtatcaacgcagagtacnnccgtattgnncatatcggnntttttttttttttttttttttttttttttt

SEQ ID NO: 3616 - DNA, 84 bp, synthetic construct
  source 1..84: mol_type = other DNA
tttttttaagcagtggtatcaacgcagagtacnnccgtattgnncttcggtanntttttttttttttttttttttttttttttt

SEQ ID NO: 3617 - DNA, 84 bp, synthetic construct
  source 1..84: mol_type = other DNA
tttttttaagcagtggtatcaacgcagagtacnnccgtattgnntcctaacgnntttttttttttttttttttttttttttttt

SEQ ID NO: 3618 - DNA, 84 bp, synthetic construct
  source 1..84: mol_type = other DNA
tttttttaagcagtggtatcaacgcagagtacnnccgtattgnngtaagccanntttttttttttttttttttttttttttttt

SEQ ID NO: 3619 - DNA, 84 bp, synthetic construct
  source 1..84: mol_type = other DNA
tttttttaagcagtggtatcaacgcagagtacnnccgtattgnntaaggtggnntttttttttttttttttttttttttttttt

SEQ ID NO: 3620 - DNA, 84 bp, synthetic construct
  source 1..84: mol_type = other DNA
tttttttaagcagtggtatcaacgcagagtacnnccgtattgnnggtaagctnntttttttttttttttttttttttttttttt

SEQ ID NO: 3621 - DNA, 84 bp, synthetic construct
  source 1..84: mol_type = other DNA
tttttttaagcagtggtatcaacgcagagtacnnccgtattgnntgtgtcganntttttttttttttttttttttttttttttt

SEQ ID NO: 3622 - DNA, 84 bp, synthetic construct
  source 1..84: mol_type = other DNA
tttttttaagcagtggtatcaacgcagagtacnnccgtattgnngagcatganntttttttttttttttttttttttttttttt

SEQ ID NO: 3623 - DNA, 84 bp, synthetic construct
  source 1..84: mol_type = other DNA
tttttttaagcagtggtatcaacgcagagtacnnccgtattgnntcgaagtcnntttttttttttttttttttttttttttttt

SEQ ID NO: 3624 - DNA, 84 bp, synthetic construct
  source 1..84: mol_type = other DNA
tttttttaagcagtggtatcaacgcagagtacnnccgtattgnnggtgaacanntttttttttttttttttttttttttttttt

SEQ ID NO: 3625 - DNA, 84 bp, synthetic construct
  source 1..84: mol_type = other DNA
tttttttaagcagtggtatcaacgcagagtacnnccgtattgnnacatgcacnntttttttttttttttttttttttttttttt

SEQ ID NO: 3626 - DNA, 84 bp, synthetic construct
  source 1..84: mol_type = other DNA
tttttttaagcagtggtatcaacgcagagtacnnccgtattgnnccaacagtnntttttttttttttttttttttttttttttt

SEQ ID NO: 3627 - DNA, 84 bp, synthetic construct
  source 1..84: mol_type = other DNA
tttttttaagcagtggtatcaacgcagagtacnnccgtattgnnagaacagcnntttttttttttttttttttttttttttttt

SEQ ID NO: 3628 - DNA, 84 bp, synthetic construct
  source 1..84: mol_type = other DNA
tttttttaagcagtggtatcaacgcagagtacnnccgtattgnngaacacgtnntttttttttttttttttttttttttttttt

SEQ ID NO: 3629 - DNA, 84 bp, synthetic construct
  source 1..84: mol_type = other DNA
tttttttaagcagtggtatcaacgcagagtacnnccgtattgnnggtcttcanntttttttttttttttttttttttttttttt

SEQ ID NO: 3630 - DNA, 84 bp, synthetic construct
  source 1..84: mol_type = other DNA
tttttttaagcagtggtatcaacgcagagtacnnccgtattgnnaggttcagnntttttttttttttttttttttttttttttt

SEQ ID NO: 3631 - DNA, 84 bp, synthetic construct
  source 1..84: mol_type = other DNA
tttttttaagcagtggtatcaacgcagagtacnnccgtattgnnctagagcanntttttttttttttttttttttttttttttt

SEQ ID NO: 3632 - DNA, 84 bp, synthetic construct
  source 1..84: mol_type = other DNA
tttttttaagcagtggtatcaacgcagagtacnnccgtattgnncttctagcnntttttttttttttttttttttttttttttt

SEQ ID NO: 3633 - DNA, 84 bp, synthetic construct
  source 1..84: mol_type = other DNA
tttttttaagcagtggtatcaacgcagagtacnnccgtattgnngagtaacgnntttttttttttttttttttttttttttttt

SEQ ID NO: 3634 - DNA, 84 bp, synthetic construct
  source 1..84: mol_type = other DNA
tttttttaagcagtggtatcaacgcagagtacnnccgtattgnnctaagaggnntttttttttttttttttttttttttttttt

SEQ ID NO: 3635 - DNA, 84 bp, synthetic construct
  source 1..84: mol_type = other DNA
tttttttaagcagtggtatcaacgcagagtacnnccgtattgnnacgtgtagnntttttttttttttttttttttttttttttt

SEQ ID NO: 3636 - DNA, 84 bp, synthetic construct
  source 1..84: mol_type = other DNA
tttttttaagcagtggtatcaacgcagagtacnnccgtattgnnactacaggnntttttttttttttttttttttttttttttt

SEQ ID NO: 3637 - DNA, 84 bp, synthetic construct
  source 1..84: mol_type = other DNA
tttttttaagcagtggtatcaacgcagagtacnnccgtattgnntacaggtcnntttttttttttttttttttttttttttttt

SEQ ID NO: 3638 - DNA, 84 bp, synthetic construct
  source 1..84: mol_type = other DNA
tttttttaagcagtggtatcaacgcagagtacnnccgtattgnnctcacatgnntttttttttttttttttttttttttttttt

SEQ ID NO: 3639 - DNA, 84 bp, synthetic construct
  source 1..84: mol_type = other DNA
tttttttaagcagtggtatcaacgcagagtacnnccgtattgnnactaggagnntttttttttttttttttttttttttttttt

SEQ ID NO: 3640 - DNA, 84 bp, synthetic construct
  source 1..84: mol_type = other DNA
tttttttaagcagtggtatcaacgcagagtacnnccgtattgnnccatagganntttttttttttttttttttttttttttttt

SEQ ID NO: 3641 - DNA, 84 bp, synthetic construct
  source 1..84: mol_type = other DNA
tttttttaagcagtggtatcaacgcagagtacnnccgtattgnnggagaatcnntttttttttttttttttttttttttttttt

SEQ ID NO: 3642 - DNA, 84 bp, synthetic construct
  source 1..84: mol_type = other DNA
tttttttaagcagtggtatcaacgcagagtacnnccgtattgnngccaagaanntttttttttttttttttttttttttttttt

SEQ ID NO: 3643 - DNA, 84 bp, synthetic construct
  source 1..84: mol_type = other DNA
tttttttaagcagtggtatcaacgcagagtacnnccgtattgnnaaggcaagnntttttttttttttttttttttttttttttt

SEQ ID NO: 3644 - DNA, 84 bp, synthetic construct
  source 1..84: mol_type = other DNA
tttttttaagcagtggtatcaacgcagagtacnnccgtattgnnaatgtcgcnntttttttttttttttttttttttttttttt

SEQ ID NO: 3645 - DNA, 84 bp, synthetic construct
  source 1..84: mol_type = other DNA
tttttttaagcagtggtatcaacgcagagtacnnccgtattgnnatggaaccnntttttttttttttttttttttttttttttt

SEQ ID NO: 3646 - DNA, 84 bp, synthetic construct
  source 1..84: mol_type = other DNA
tttttttaagcagtggtatcaacgcagagtacnnccgtattgnnagaggcatnntttttttttttttttttttttttttttttt

SEQ ID NO: 3647 - DNA, 84 bp, synthetic construct
  source 1..84: mol_type = other DNA
tttttttaagcagtggtatcaacgcagagtacnnccgtattgnntgcatagcnntttttttttttttttttttttttttttttt

SEQ ID NO: 3648 - DNA, 84 bp, synthetic construct
  source 1..84: mol_type = other DNA
tttttttaagcagtggtatcaacgcagagtacnnccgtattgnnctaacgganntttttttttttttttttttttttttttttt

SEQ ID NO: 3649 - DNA, 84 bp, synthetic construct
  source 1..84: mol_type = other DNA
tttttttaagcagtggtatcaacgcagagtacnnccgtattgnntatcgaggnntttttttttttttttttttttttttttttt

SEQ ID NO: 3650 - DNA, 84 bp, synthetic construct
  source 1..84: mol_type = other DNA
tttttttaagcagtggtatcaacgcagagtacnnccgtattgnncatagcctnntttttttttttttttttttttttttttttt

SEQ ID NO: 3651 - DNA, 84 bp, synthetic construct
  source 1..84: mol_type = other DNA
tttttttaagcagtggtatcaacgcagagtacnnccgtattgnnatcgagacnntttttttttttttttttttttttttttttt

SEQ ID NO: 3652 - DNA, 84 bp, synthetic construct
  source 1..84: mol_type = other DNA
tttttttaagcagtggtatcaacgcagagtacnnccgtattgnnggaagagtnntttttttttttttttttttttttttttttt

SEQ ID NO: 3653 - DNA, 84 bp, synthetic construct
  source 1..84: mol_type = other DNA
tttttttaagcagtggtatcaacgcagagtacnnccgtattgnnccaagtagnntttttttttttttttttttttttttttttt

SEQ ID NO: 3654 - DNA, 84 bp, synthetic construct
  source 1..84: mol_type = other DNA
tttttttaagcagtggtatcaacgcagagtacnnccgtattgnnctgaacagnntttttttttttttttttttttttttttttt

SEQ ID NO: 3655 - DNA, 84 bp, synthetic construct
  source 1..84: mol_type = other DNA
tttttttaagcagtggtatcaacgcagagtacnnccgtattgnngtaggttcnntttttttttttttttttttttttttttttt

SEQ ID NO: 3656 - DNA, 84 bp, synthetic construct
  source 1..84: mol_type = other DNA
tttttttaagcagtggtatcaacgcagagtacnnccgtattgnngtatggacnntttttttttttttttttttttttttttttt

SEQ ID NO: 3657 - DNA, 84 bp, synthetic construct
  source 1..84: mol_type = other DNA
tttttttaagcagtggtatcaacgcagagtacnnccgtattgnntcgcaacanntttttttttttttttttttttttttttttt

SEQ ID NO: 3658 - DNA, 84 bp, synthetic construct
  source 1..84: mol_type = other DNA
tttttttaagcagtggtatcaacgcagagtacnnccgtattgnnccgctaatnntttttttttttttttttttttttttttttt

SEQ ID NO: 3659 - DNA, 84 bp, synthetic construct
  source 1..84: mol_type = other DNA
tttttttaagcagtggtatcaacgcagagtacnnccgtattgnngattcgcanntttttttttttttttttttttttttttttt

SEQ ID NO: 3660 - DNA, 84 bp, synthetic construct
  source 1..84: mol_type = other DNA
tttttttaagcagtggtatcaacgcagagtacnnccgtattgnncgatggaanntttttttttttttttttttttttttttttt

SEQ ID NO: 3661 - DNA, 84 bp, synthetic construct
  source 1..84: mol_type = other DNA
tttttttaagcagtggtatcaacgcagagtacnnccgtattgnnagcaagganntttttttttttttttttttttttttttttt

SEQ ID NO: 3662 - DNA, 84 bp, synthetic construct
  source 1..84: mol_type = other DNA
tttttttaagcagtggtatcaacgcagagtacnnccgtattgnncgtagcaanntttttttttttttttttttttttttttttt

SEQ ID NO: 3663 - DNA, 84 bp, synthetic construct
  source 1..84: mol_type = other DNA
tttttttaagcagtggtatcaacgcagagtacnnccgtattgnntggcagtanntttttttttttttttttttttttttttttt

SEQ ID NO: 3664 - DNA, 84 bp, synthetic construct
  source 1..84: mol_type = other DNA
tttttttaagcagtggtatcaacgcagagtacnnccgtattgnncggtagttnntttttttttttttttttttttttttttttt

SEQ ID NO: 3665 - DNA, 84 bp, synthetic construct
  source 1..84: mol_type = other DNA
tttttttaagcagtggtatcaacgcagagtacnnccgtattgnntgacttcgnntttttttttttttttttttttttttttttt

SEQ ID NO: 3666 - DNA, 84 bp, synthetic construct
  source 1..84: mol_type = other DNA
tttttttaagcagtggtatcaacgcagagtacnnccgtattgnngagtgcaanntttttttttttttttttttttttttttttt

SEQ ID NO: 3667 - DNA, 84 bp, synthetic construct
  source 1..84: mol_type = other DNA
tttttttaagcagtggtatcaacgcagagtacnnccgtattgnnacggtaacnntttttttttttttttttttttttttttttt

SEQ ID NO: 3668 - DNA, 84 bp, synthetic construct
  source 1..84: mol_type = other DNA
tttttttaagcagtggtatcaacgcagagtacnnccgtattgnnaagtggtgnntttttttttttttttttttttttttttttt

SEQ ID NO: 3669 - DNA, 84 bp, synthetic construct
  source 1..84: mol_type = other DNA
tttttttaagcagtggtatcaacgcagagtacnnccgtattgnnggagacaanntttttttttttttttttttttttttttttt

SEQ ID NO: 3670 - DNA, 84 bp, synthetic construct
  source 1..84: mol_type = other DNA
tttttttaagcagtggtatcaacgcagagtacnnccgtattgnntcaaggacnntttttttttttttttttttttttttttttt

SEQ ID NO: 3671 - DNA, 84 bp, synthetic construct
  source 1..84: mol_type = other DNA
tttttttaagcagtggtatcaacgcagagtacnnccgtattgnnaagagagcnntttttttttttttttttttttttttttttt

SEQ ID NO: 3672 - DNA, 84 bp, synthetic construct
  source 1..84: mol_type = other DNA
tttttttaagcagtggtatcaacgcagagtacnnccgtattgnncgagagatnntttttttttttttttttttttttttttttt

SEQ ID NO: 3673 - DNA, 84 bp, synthetic construct
  source 1..84: mol_type = other DNA
tttttttaagcagtggtatcaacgcagagtacnnccgtattgnnacagatggnntttttttttttttttttttttttttttttt

SEQ ID NO: 3674 - DNA, 84 bp, synthetic construct
  source 1..84: mol_type = other DNA
tttttttaagcagtggtatcaacgcagagtacnnccgtattgnnaggagtcanntttttttttttttttttttttttttttttt

SEQ ID NO: 3675 - DNA, 84 bp, synthetic construct
  source 1..84: mol_type = other DNA
tttttttaagcagtggtatcaacgcagagtacnnccgtattgnncgtgttacnntttttttttttttttttttttttttttttt

SEQ ID NO: 3676 - DNA, 84 bp, synthetic construct
  source 1..84: mol_type = other DNA
tttttttaagcagtggtatcaacgcagagtacnnccgtattgnntagtgtgcnntttttttttttttttttttttttttttttt

SEQ ID NO: 3677 - DNA, 84 bp, synthetic construct
  source 1..84: mol_type = other DNA
tttttttaagcagtggtatcaacgcagagtacnnccgtattgnnctcatgacnntttttttttttttttttttttttttttttt

SEQ ID NO: 3678 - DNA, 84 bp, synthetic construct
  source 1..84: mol_type = other DNA
tttttttaagcagtggtatcaacgcagagtacnnccgtattgnngtatccagnntttttttttttttttttttttttttttttt

SEQ ID NO: 3679 - DNA, 84 bp, synthetic construct
  source 1..84: mol_type = other DNA
tttttttaagcagtggtatcaacgcagagtacnnccgtattgnnacgcctatnntttttttttttttttttttttttttttttt

SEQ ID NO: 3680 - DNA, 84 bp, synthetic construct
  source 1..84: mol_type = other DNA
tttttttaagcagtggtatcaacgcagagtacnnccgtattgnnaacgacctnntttttttttttttttttttttttttttttt

SEQ ID NO: 3681 - DNA, 84 bp, synthetic construct
  source 1..84: mol_type = other DNA
tttttttaagcagtggtatcaacgcagagtacnnccgtattgnnatcaggctnntttttttttttttttttttttttttttttt

SEQ ID NO: 3682 - DNA, 84 bp, synthetic construct
  source 1..84: mol_type = other DNA
tttttttaagcagtggtatcaacgcagagtacnnccgtattgnncaagttcgnntttttttttttttttttttttttttttttt

SEQ ID NO: 3683 - DNA, 84 bp, synthetic construct
  source 1..84: mol_type = other DNA
tttttttaagcagtggtatcaacgcagagtacnnccgtattgnntagccaganntttttttttttttttttttttttttttttt

SEQ ID NO: 3684 - DNA, 84 bp, synthetic construct
  source 1..84: mol_type = other DNA
tttttttaagcagtggtatcaacgcagagtacnnccgtattgnncaatcacgnntttttttttttttttttttttttttttttt

SEQ ID NO: 3685 - DNA, 84 bp, synthetic construct
  source 1..84: mol_type = other DNA
tttttttaagcagtggtatcaacgcagagtacnnccgtattgnngcaacaagnntttttttttttttttttttttttttttttt

SEQ ID NO: 3686 - DNA, 84 bp, synthetic construct
  source 1..84: mol_type = other DNA
tttttttaagcagtggtatcaacgcagagtacnnccgtattgnncacgacaanntttttttttttttttttttttttttttttt

SEQ ID NO: 3687 - DNA, 84 bp, synthetic construct
  source 1..84: mol_type = other DNA
tttttttaagcagtggtatcaacgcagagtacnnccgtattgnntacggaganntttttttttttttttttttttttttttttt

SEQ ID NO: 3688 - DNA, 84 bp, synthetic construct
  source 1..84: mol_type = other DNA
tttttttaagcagtggtatcaacgcagagtacnnccgtattgnncgacaaganntttttttttttttttttttttttttttttt

SEQ ID NO: 3689 - DNA, 84 bp, synthetic construct
  source 1..84: mol_type = other DNA
tttttttaagcagtggtatcaacgcagagtacnnccgtattgnncgaagtganntttttttttttttttttttttttttttttt

SEQ ID NO: 3690 - DNA, 84 bp, synthetic construct
  source 1..84: mol_type = other DNA
tttttttaagcagtggtatcaacgcagagtacnnccgtattgnnagctggtanntttttttttttttttttttttttttttttt

SEQ ID NO: 3691 - DNA, 84 bp, synthetic construct
  source 1..84: mol_type = other DNA
tttttttaagcagtggtatcaacgcagagtacnnccgtattgnnaactaggcnntttttttttttttttttttttttttttttt

SEQ ID NO: 3692 - DNA, 84 bp, synthetic construct
  source 1..84: mol_type = other DNA
tttttttaagcagtggtatcaacgcagagtacnnccgtattgnncagcaagtnntttttttttttttttttttttttttttttt

SEQ ID NO: 3693 - DNA, 84 bp, synthetic construct
  source 1..84: mol_type = other DNA
tttttttaagcagtggtatcaacgcagagtacnnccgtattgnnacgaggtanntttttttttttttttttttttttttttttt

SEQ ID NO: 3694 - DNA, 84 bp, synthetic construct
  source 1..84: mol_type = other DNA
tttttttaagcagtggtatcaacgcagagtacnnccgtattgnncatcttccnntttttttttttttttttttttttttttttt

SEQ ID NO: 3695 - DNA, 84 bp, synthetic construct
  source 1..84: mol_type = other DNA
tttttttaagcagtggtatcaacgcagagtacnnccgtattgnncctgaatcnntttttttttttttttttttttttttttttt

SEQ ID NO: 3696 - DNA, 84 bp, synthetic construct
  source 1..84: mol_type = other DNA
tttttttaagcagtggtatcaacgcagagtacnnccgtattgnntgcagactnntttttttttttttttttttttttttttttt

SEQ ID NO: 3697 - DNA, 84 bp, synthetic construct
  source 1..84: mol_type = other DNA
tttttttaagcagtggtatcaacgcagagtacnnccgtattgnnagatgtggnntttttttttttttttttttttttttttttt

SEQ ID NO: 3698 - DNA, 84 bp, synthetic construct
  source 1..84: mol_type = other DNA
tttttttaagcagtggtatcaacgcagagtacnnccgtattgnnagttcgacnntttttttttttttttttttttttttttttt

SEQ ID NO: 3699 - DNA, 84 bp, synthetic construct
  source 1..84: mol_type = other DNA
tttttttaagcagtggtatcaacgcagagtacnnccgtattgnnacaacctcnntttttttttttttttttttttttttttttt

SEQ ID NO: 3700 - DNA, 84 bp, synthetic construct
  source 1..84: mol_type = other DNA
tttttttaagcagtggtatcaacgcagagtacnnccgtattgnncatggtagnntttttttttttttttttttttttttttttt

SEQ ID NO: 3701 - DNA, 84 bp, synthetic construct
  source 1..84: mol_type = other DNA
tttttttaagcagtggtatcaacgcagagtacnnccgtattgnncgtatctcnntttttttttttttttttttttttttttttt

SEQ ID NO: 3702 - DNA, 84 bp, synthetic construct
  source 1..84: mol_type = other DNA
tttttttaagcagtggtatcaacgcagagtacnnccgtattgnncctagttcnntttttttttttttttttttttttttttttt

SEQ ID NO: 3703 - DNA, 84 bp, synthetic construct
  source 1..84: mol_type = other DNA
tttttttaagcagtggtatcaacgcagagtacnnccgtattgnncaagagtcnntttttttttttttttttttttttttttttt

SEQ ID NO: 3704 - DNA, 84 bp, synthetic construct
  source 1..84: mol_type = other DNA
tttttttaagcagtggtatcaacgcagagtacnnaaggaggtnnaatcggcanntttttttttttttttttttttttttttttt

SEQ ID NO: 3705 - DNA, 84 bp, synthetic construct
  source 1..84: mol_type = other DNA
tttttttaagcagtggtatcaacgcagagtacnnaaggaggtnntacggcatnntttttttttttttttttttttttttttttt

SEQ ID NO: 3706 - DNA, 84 bp, synthetic construct
  source 1..84: mol_type = other DNA
tttttttaagcagtggtatcaacgcagagtacnnaaggaggtnnttggatcgnntttttttttttttttttttttttttttttt

SEQ ID NO: 3707 - DNA, 84 bp, synthetic construct
  source 1..84: mol_type = other DNA
tttttttaagcagtggtatcaacgcagagtacnnaaggaggtnntggaacganntttttttttttttttttttttttttttttt

SEQ ID NO: 3708 - DNA, 84 bp, synthetic construct
  source 1..84: mol_type = other DNA
tttttttaagcagtggtatcaacgcagagtacnnaaggaggtnnggcaatcanntttttttttttttttttttttttttttttt

SEQ ID NO: 3709 - DNA, 84 bp, synthetic construct
  source 1..84: mol_type = other DNA
tttttttaagcagtggtatcaacgcagagtacnnaaggaggtnngaatccganntttttttttttttttttttttttttttttt

SEQ ID NO: 3710 - DNA, 84 bp, synthetic construct
  source 1..84: mol_type = other DNA
tttttttaagcagtggtatcaacgcagagtacnnaaggaggtnnttacggtgnntttttttttttttttttttttttttttttt

SEQ ID NO: 3711 - DNA, 84 bp, synthetic construct
  source 1..84: mol_type = other DNA
tttttttaagcagtggtatcaacgcagagtacnnaaggaggtnncatatcggnntttttttttttttttttttttttttttttt

SEQ ID NO: 3712 - DNA, 84 bp, synthetic construct
  source 1..84: mol_type = other DNA
tttttttaagcagtggtatcaacgcagagtacnnaaggaggtnncttcggtanntttttttttttttttttttttttttttttt

SEQ ID NO: 3713 - DNA, 84 bp, synthetic construct
  source 1..84: mol_type = other DNA
tttttttaagcagtggtatcaacgcagagtacnnaaggaggtnntcctaacgnntttttttttttttttttttttttttttttt

SEQ ID NO: 3714 - DNA, 84 bp, synthetic construct
  source 1..84: mol_type = other DNA
tttttttaagcagtggtatcaacgcagagtacnnaaggaggtnngtaagccanntttttttttttttttttttttttttttttt

SEQ ID NO: 3715 - DNA, 84 bp, synthetic construct
  source 1..84: mol_type = other DNA
tttttttaagcagtggtatcaacgcagagtacnnaaggaggtnntaaggtggnntttttttttttttttttttttttttttttt

SEQ ID NO: 3716 - DNA, 84 bp, synthetic construct
  source 1..84: mol_type = other DNA
tttttttaagcagtggtatcaacgcagagtacnnaaggaggtnnggtaagctnntttttttttttttttttttttttttttttt

SEQ ID NO: 3717 - DNA, 84 bp, synthetic construct
  source 1..84: mol_type = other DNA
tttttttaagcagtggtatcaacgcagagtacnnaaggaggtnntgtgtcganntttttttttttttttttttttttttttttt

SEQ ID NO: 3718 - DNA, 84 bp, synthetic construct
  source 1..84: mol_type = other DNA
tttttttaagcagtggtatcaacgcagagtacnnaaggaggtnngagcatganntttttttttttttttttttttttttttttt

SEQ ID NO: 3719 - DNA, 84 bp, synthetic construct
  source 1..84: mol_type = other DNA
tttttttaagcagtggtatcaacgcagagtacnnaaggaggtnntcgaagtcnntttttttttttttttttttttttttttttt

SEQ ID NO: 3720 - DNA, 84 bp, synthetic construct
  source 1..84: mol_type = other DNA
tttttttaagcagtggtatcaacgcagagtacnnaaggaggtnnggtgaacanntttttttttttttttttttttttttttttt

SEQ ID NO: 3721 - DNA, 84 bp, synthetic construct
  source 1..84: mol_type = other DNA
tttttttaagcagtggtatcaacgcagagtacnnaaggaggtnnacatgcacnntttttttttttttttttttttttttttttt

SEQ ID NO: 3722 - DNA, 84 bp, synthetic construct
  source 1..84: mol_type = other DNA
tttttttaagcagtggtatcaacgcagagtacnnaaggaggtnnccaacagtnntttttttttttttttttttttttttttttt

SEQ ID NO: 3723 - DNA, 84 bp, synthetic construct
  source 1..84: mol_type = other DNA
tttttttaagcagtggtatcaacgcagagtacnnaaggaggtnnagaacagcnntttttttttttttttttttttttttttttt

SEQ ID NO: 3724 - DNA, 84 bp, synthetic construct
  source 1..84: mol_type = other DNA
tttttttaagcagtggtatcaacgcagagtacnnaaggaggtnngaacacgtnntttttttttttttttttttttttttttttt

SEQ ID NO: 3725 - DNA, 84 bp, synthetic construct
  source 1..84: mol_type = other DNA
tttttttaagcagtggtatcaacgcagagtacnnaaggaggtnnggtcttcanntttttttttttttttttttttttttttttt

SEQ ID NO: 3726 - DNA, 84 bp, synthetic construct
  source 1..84: mol_type = other DNA
tttttttaagcagtggtatcaacgcagagtacnnaaggaggtnnaggttcagnntttttttttttttttttttttttttttttt

SEQ ID NO: 3727 - DNA, 84 bp, synthetic construct
  source 1..84: mol_type = other DNA
tttttttaagcagtggtatcaacgcagagtacnnaaggaggtnnctagagcanntttttttttttttttttttttttttttttt

SEQ ID NO: 3728 - DNA, 84 bp, synthetic construct
  source 1..84: mol_type = other DNA
tttttttaagcagtggtatcaacgcagagtacnnaaggaggtnncttctagcnntttttttttttttttttttttttttttttt

SEQ ID NO: 3729 - DNA, 84 bp, synthetic construct
  source 1..84: mol_type = other DNA
tttttttaagcagtggtatcaacgcagagtacnnaaggaggtnngagtaacgnntttttttttttttttttttttttttttttt

SEQ ID NO: 3730 - DNA, 84 bp, synthetic construct
  source 1..84: mol_type = other DNA
tttttttaagcagtggtatcaacgcagagtacnnaaggaggtnnctaagaggnntttttttttttttttttttttttttttttt

SEQ ID NO: 3731 - DNA, 84 bp, synthetic construct
  source 1..84: mol_type = other DNA
tttttttaagcagtggtatcaacgcagagtacnnaaggaggtnnacgtgtagnntttttttttttttttttttttttttttttt

SEQ ID NO: 3732 - DNA, 84 bp, synthetic construct
  source 1..84: mol_type = other DNA
tttttttaagcagtggtatcaacgcagagtacnnaaggaggtnnactacaggnntttttttttttttttttttttttttttttt

SEQ ID NO: 3733 - DNA, 84 bp, synthetic construct
  source 1..84: mol_type = other DNA
tttttttaagcagtggtatcaacgcagagtacnnaaggaggtnntacaggtcnntttttttttttttttttttttttttttttt

SEQ ID NO: 3734 - DNA, 84 bp, synthetic construct
  source 1..84: mol_type = other DNA
tttttttaagcagtggtatcaacgcagagtacnnaaggaggtnnctcacatgnntttttttttttttttttttttttttttttt

SEQ ID NO: 3735 - DNA, 84 bp, synthetic construct
  source 1..84: mol_type = other DNA
tttttttaagcagtggtatcaacgcagagtacnnaaggaggtnnactaggagnntttttttttttttttttttttttttttttt

SEQ ID NO: 3736 - DNA, 84 bp, synthetic construct
  source 1..84: mol_type = other DNA
tttttttaagcagtggtatcaacgcagagtacnnaaggaggtnnccatagganntttttttttttttttttttttttttttttt

SEQ ID NO: 3737 - DNA, 84 bp, synthetic construct
  source 1..84: mol_type = other DNA
tttttttaagcagtggtatcaacgcagagtacnnaaggaggtnnggagaatcnntttttttttttttttttttttttttttttt

SEQ ID NO: 3738 - DNA, 84 bp, synthetic construct
  source 1..84: mol_type = other DNA
tttttttaagcagtggtatcaacgcagagtacnnaaggaggtnngccaagaanntttttttttttttttttttttttttttttt

SEQ ID NO: 3739 - DNA, 84 bp, synthetic construct
  source 1..84: mol_type = other DNA
tttttttaagcagtggtatcaacgcagagtacnnaaggaggtnnaaggcaagnntttttttttttttttttttttttttttttt

SEQ ID NO: 3740 - DNA, 84 bp, synthetic construct
  source 1..84: mol_type = other DNA
tttttttaagcagtggtatcaacgcagagtacnnaaggaggtnnaatgtcgcnntttttttttttttttttttttttttttttt

SEQ ID NO: 3741 - DNA, 84 bp, synthetic construct
  source 1..84: mol_type = other DNA
tttttttaagcagtggtatcaacgcagagtacnnaaggaggtnnatggaaccnntttttttttttttttttttttttttttttt

SEQ ID NO: 3742 - DNA, 84 bp, synthetic construct
  source 1..84: mol_type = other DNA
tttttttaagcagtggtatcaacgcagagtacnnaaggaggtnnagaggcatnntttttttttttttttttttttttttttttt

SEQ ID NO: 3743 - DNA, 84 bp, synthetic construct
  source 1..84: mol_type = other DNA
tttttttaagcagtggtatcaacgcagagtacnnaaggaggtnntgcatagcnntttttttttttttttttttttttttttttt

SEQ ID NO: 3744 - DNA, 84 bp, synthetic construct
  source 1..84: mol_type = other DNA
tttttttaagcagtggtatcaacgcagagtacnnaaggaggtnnctaacgganntttttttttttttttttttttttttttttt

SEQ ID NO: 3745 - DNA, 84 bp, synthetic construct
  source 1..84: mol_type = other DNA
tttttttaagcagtggtatcaacgcagagtacnnaaggaggtnntatcgaggnntttttttttttttttttttttttttttttt

SEQ ID NO: 3746 - DNA, 84 bp, synthetic construct
  source 1..84: mol_type = other DNA
tttttttaagcagtggtatcaacgcagagtacnnaaggaggtnncatagcctnntttttttttttttttttttttttttttttt

SEQ ID NO: 3747 - DNA, 84 bp, synthetic construct
  source 1..84: mol_type = other DNA
tttttttaagcagtggtatcaacgcagagtacnnaaggaggtnnatcgagacnntttttttttttttttttttttttttttttt

SEQ ID NO: 3748 - DNA, 84 bp, synthetic construct
  source 1..84: mol_type = other DNA
tttttttaagcagtggtatcaacgcagagtacnnaaggaggtnnggaagagtnntttttttttttttttttttttttttttttt

SEQ ID NO: 3749 - DNA, 84 bp, synthetic construct
  source 1..84: mol_type = other DNA
tttttttaagcagtggtatcaacgcagagtacnnaaggaggtnnccaagtagnntttttttttttttttttttttttttttttt

SEQ ID NO: 3750 - DNA, 84 bp, synthetic construct
  source 1..84: mol_type = other DNA
tttttttaagcagtggtatcaacgcagagtacnnaaggaggtnnctgaacagnntttttttttttttttttttttttttttttt

SEQ ID NO: 3751 - DNA, 84 bp, synthetic construct
  source 1..84: mol_type = other DNA
tttttttaagcagtggtatcaacgcagagtacnnaaggaggtnngtaggttcnntttttttttttttttttttttttttttttt

SEQ ID NO: 3752 - DNA, 84 bp, synthetic construct
  source 1..84: mol_type = other DNA
tttttttaagcagtggtatcaacgcagagtacnnaaggaggtnngtatggacnntttttttttttttttttttttttttttttt

SEQ ID NO: 3753 - DNA, 84 bp, synthetic construct
  source 1..84: mol_type = other DNA
tttttttaagcagtggtatcaacgcagagtacnnaaggaggtnntcgcaacanntttttttttttttttttttttttttttttt

SEQ ID NO: 3754 - DNA, 84 bp, synthetic construct
  source 1..84: mol_type = other DNA
tttttttaagcagtggtatcaacgcagagtacnnaaggaggtnnccgctaatnntttttttttttttttttttttttttttttt

SEQ ID NO: 3755 - DNA, 84 bp, synthetic construct
  source 1..84: mol_type = other DNA
tttttttaagcagtggtatcaacgcagagtacnnaaggaggtnngattcgcanntttttttttttttttttttttttttttttt

SEQ ID NO: 3756 - DNA, 84 bp, synthetic construct
  source 1..84: mol_type = other DNA
tttttttaagcagtggtatcaacgcagagtacnnaaggaggtnncgatggaanntttttttttttttttttttttttttttttt

SEQ ID NO: 3757 - DNA, 84 bp, synthetic construct
  source 1..84: mol_type = other DNA
tttttttaagcagtggtatcaacgcagagtacnnaaggaggtnnagcaagganntttttttttttttttttttttttttttttt

SEQ ID NO: 3758 - DNA, 84 bp, synthetic construct
  source 1..84: mol_type = other DNA
tttttttaagcagtggtatcaacgcagagtacnnaaggaggtnncgtagcaanntttttttttttttttttttttttttttttt

SEQ ID NO: 3759 - DNA, 84 bp, synthetic construct
  source 1..84: mol_type = other DNA
tttttttaagcagtggtatcaacgcagagtacnnaaggaggtnntggcagtanntttttttttttttttttttttttttttttt

SEQ ID NO: 3760 - DNA, 84 bp, synthetic construct
  source 1..84: mol_type = other DNA
tttttttaagcagtggtatcaacgcagagtacnnaaggaggtnncggtagttnntttttttttttttttttttttttttttttt

SEQ ID NO: 3761 - DNA, 84 bp, synthetic construct
  source 1..84: mol_type = other DNA
tttttttaagcagtggtatcaacgcagagtacnnaaggaggtnntgacttcgnntttttttttttttttttttttttttttttt

SEQ ID NO: 3762 - DNA, 84 bp, synthetic construct
  source 1..84: mol_type = other DNA
tttttttaagcagtggtatcaacgcagagtacnnaaggaggtnngagtgcaanntttttttttttttttttttttttttttttt

SEQ ID NO: 3763 - DNA, 84 bp, synthetic construct
  source 1..84: mol_type = other DNA
tttttttaagcagtggtatcaacgcagagtacnnaaggaggtnnacggtaacnntttttttttttttttttttttttttttttt

SEQ ID NO: 3764 - DNA, 84 bp, synthetic construct
  source 1..84: mol_type = other DNA
tttttttaagcagtggtatcaacgcagagtacnnaaggaggtnnaagtggtgnntttttttttttttttttttttttttttttt

SEQ ID NO: 3765 - DNA, 84 bp, synthetic construct
  source 1..84: mol_type = other DNA
tttttttaagcagtggtatcaacgcagagtacnnaaggaggtnnggagacaanntttttttttttttttttttttttttttttt

SEQ ID NO: 3766 - DNA, 84 bp, synthetic construct
  source 1..84: mol_type = other DNA
tttttttaagcagtggtatcaacgcagagtacnnaaggaggtnntcaaggacnntttttttttttttttttttttttttttttt

SEQ ID NO: 3767 - DNA, 84 bp, synthetic construct
  source 1..84: mol_type = other DNA
tttttttaagcagtggtatcaacgcagagtacnnaaggaggtnnaagagagcnntttttttttttttttttttttttttttttt

SEQ ID NO: 3768 - DNA, 84 bp, synthetic construct
  source 1..84: mol_type = other DNA
tttttttaagcagtggtatcaacgcagagtacnnaaggaggtnncgagagatnntttttttttttttttttttttttttttttt

SEQ ID NO: 3769 - DNA, 84 bp, synthetic construct
  source 1..84: mol_type = other DNA
tttttttaagcagtggtatcaacgcagagtacnnaaggaggtnnacagatggnntttttttttttttttttttttttttttttt

SEQ ID NO: 3770 - DNA, 84 bp, synthetic construct
  source 1..84: mol_type = other DNA
tttttttaagcagtggtatcaacgcagagtacnnaaggaggtnnaggagtcanntttttttttttttttttttttttttttttt

SEQ ID NO: 3771 - DNA, 84 bp, synthetic construct
  source 1..84: mol_type = other DNA
tttttttaagcagtggtatcaacgcagagtacnnaaggaggtnncgtgttacnntttttttttttttttttttttttttttttt

SEQ ID NO: 3772 - DNA, 84 bp, synthetic construct
  source 1..84: mol_type = other DNA
tttttttaagcagtggtatcaacgcagagtacnnaaggaggtnntagtgtgcnntttttttttttttttttttttttttttttt

SEQ ID NO: 3773 - DNA, 84 bp, synthetic construct
  source 1..84: mol_type = other DNA
tttttttaagcagtggtatcaacgcagagtacnnaaggaggtnnctcatgacnntttttttttttttttttttttttttttttt

SEQ ID NO: 3774 - DNA, 84 bp, synthetic construct
  source 1..84: mol_type = other DNA
tttttttaagcagtggtatcaacgcagagtacnnaaggaggtnngtatccagnntttttttttttttttttttttttttttttt

SEQ ID NO: 3775 - DNA, 84 bp, synthetic construct
  source 1..84: mol_type = other DNA
tttttttaagcagtggtatcaacgcagagtacnnaaggaggtnnacgcctatnntttttttttttttttttttttttttttttt

SEQ ID NO: 3776 - DNA, 84 bp, synthetic construct
  source 1..84: mol_type = other DNA
tttttttaagcagtggtatcaacgcagagtacnnaaggaggtnnaacgacctnntttttttttttttttttttttttttttttt

SEQ ID NO: 3777 - DNA, 84 bp, synthetic construct
  source 1..84: mol_type = other DNA
tttttttaagcagtggtatcaacgcagagtacnnaaggaggtnnatcaggctnntttttttttttttttttttttttttttttt

SEQ ID NO: 3778 - DNA, 84 bp, synthetic construct
  source 1..84: mol_type = other DNA
tttttttaagcagtggtatcaacgcagagtacnnaaggaggtnncaagttcgnntttttttttttttttttttttttttttttt

SEQ ID NO: 3779 - DNA, 84 bp, synthetic construct
  source 1..84: mol_type = other DNA
tttttttaagcagtggtatcaacgcagagtacnnaaggaggtnntagccaganntttttttttttttttttttttttttttttt

SEQ ID NO: 3780 - DNA, 84 bp, synthetic construct
  source 1..84: mol_type = other DNA
tttttttaagcagtggtatcaacgcagagtacnnaaggaggtnncaatcacgnntttttttttttttttttttttttttttttt

SEQ ID NO: 3781 - DNA, 84 bp, synthetic construct
  source 1..84: mol_type = other DNA
tttttttaagcagtggtatcaacgcagagtacnnaaggaggtnngcaacaagnntttttttttttttttttttttttttttttt

SEQ ID NO: 3782 - DNA, 84 bp, synthetic construct
  source 1..84: mol_type = other DNA
tttttttaagcagtggtatcaacgcagagtacnnaaggaggtnncacgacaanntttttttttttttttttttttttttttttt

SEQ ID NO: 3783 - DNA, 84 bp, synthetic construct
  source 1..84: mol_type = other DNA
tttttttaagcagtggtatcaacgcagagtacnnaaggaggtnntacggaganntttttttttttttttttttttttttttttt

SEQ ID NO: 3784 - DNA, 84 bp, synthetic construct
  source 1..84: mol_type = other DNA
tttttttaagcagtggtatcaacgcagagtacnnaaggaggtnncgacaaganntttttttttttttttttttttttttttttt

SEQ ID NO: 3785 - DNA, 84 bp, synthetic construct
  source 1..84: mol_type = other DNA
tttttttaagcagtggtatcaacgcagagtacnnaaggaggtnncgaagtganntttttttttttttttttttttttttttttt

SEQ ID NO: 3786 - DNA, 84 bp, synthetic construct
  source 1..84: mol_type = other DNA
tttttttaagcagtggtatcaacgcagagtacnnaaggaggtnnagctggtanntttttttttttttttttttttttttttttt

SEQ ID NO: 3787 - DNA, 84 bp, synthetic construct
  source 1..84: mol_type = other DNA
tttttttaagcagtggtatcaacgcagagtacnnaaggaggtnnaactaggcnntttttttttttttttttttttttttttttt

SEQ ID NO: 3788 - DNA, 84 bp, synthetic construct
  source 1..84: mol_type = other DNA
tttttttaagcagtggtatcaacgcagagtacnnaaggaggtnncagcaagtnntttttttttttttttttttttttttttttt

SEQ ID NO: 3789 - DNA, 84 bp, synthetic construct
  source 1..84: mol_type = other DNA
tttttttaagcagtggtatcaacgcagagtacnnaaggaggtnnacgaggtanntttttttttttttttttttttttttttttt

SEQ ID NO: 3790 - DNA, 84 bp, synthetic construct
  source 1..84: mol_type = other DNA
tttttttaagcagtggtatcaacgcagagtacnnaaggaggtnncatcttccnntttttttttttttttttttttttttttttt

SEQ ID NO: 3791 - DNA, 84 bp, synthetic construct
  source 1..84: mol_type = other DNA
tttttttaagcagtggtatcaacgcagagtacnnaaggaggtnncctgaatcnntttttttttttttttttttttttttttttt

SEQ ID NO: 3792 - DNA, 84 bp, synthetic construct
  source 1..84: mol_type = other DNA
tttttttaagcagtggtatcaacgcagagtacnnaaggaggtnntgcagactnntttttttttttttttttttttttttttttt

SEQ ID NO: 3793 - DNA, 84 bp, synthetic construct
  source 1..84: mol_type = other DNA
tttttttaagcagtggtatcaacgcagagtacnnaaggaggtnnagatgtggnntttttttttttttttttttttttttttttt

SEQ ID NO: 3794 - DNA, 84 bp, synthetic construct
  source 1..84: mol_type = other DNA
tttttttaagcagtggtatcaacgcagagtacnnaaggaggtnnagttcgacnntttttttttttttttttttttttttttttt

SEQ ID NO: 3795 - DNA, 84 bp, synthetic construct
  source 1..84: mol_type = other DNA
tttttttaagcagtggtatcaacgcagagtacnnaaggaggtnnacaacctcnntttttttttttttttttttttttttttttt

SEQ ID NO: 3796 - DNA, 84 bp, synthetic construct
  source 1..84: mol_type = other DNA
tttttttaagcagtggtatcaacgcagagtacnnaaggaggtnncatggtagnntttttttttttttttttttttttttttttt

SEQ ID NO: 3797 - DNA, 84 bp, synthetic construct
  source 1..84: mol_type = other DNA
tttttttaagcagtggtatcaacgcagagtacnnaaggaggtnncgtatctcnntttttttttttttttttttttttttttttt

SEQ ID NO: 3798 - DNA, 84 bp, synthetic construct
  source 1..84: mol_type = other DNA
tttttttaagcagtggtatcaacgcagagtacnnaaggaggtnncctagttcnntttttttttttttttttttttttttttttt

SEQ ID NO: 3799 - DNA, 84 bp, synthetic construct
  source 1..84: mol_type = other DNA
tttttttaagcagtggtatcaacgcagagtacnnaaggaggtnncaagagtcnntttttttttttttttttttttttttttttt

SEQ ID NO: 3800 - DNA, 84 bp, synthetic construct
  source 1..84: mol_type = other DNA
tttttttaagcagtggtatcaacgcagagtacnnctggaatgnnaatcggcanntttttttttttttttttttttttttttttt

SEQ ID NO: 3801 - DNA, 84 bp, synthetic construct
  source 1..84: mol_type = other DNA
tttttttaagcagtggtatcaacgcagagtacnnctggaatgnntacggcatnntttttttttttttttttttttttttttttt

SEQ ID NO: 3802 - DNA, 84 bp, synthetic construct
  source 1..84: mol_type = other DNA
tttttttaagcagtggtatcaacgcagagtacnnctggaatgnnttggatcgnntttttttttttttttttttttttttttttt

SEQ ID NO: 3803 - DNA, 84 bp, synthetic construct
  source 1..84: mol_type = other DNA
tttttttaagcagtggtatcaacgcagagtacnnctggaatgnntggaacganntttttttttttttttttttttttttttttt

SEQ ID NO: 3804 - DNA, 84 bp, synthetic construct
  source 1..84: mol_type = other DNA
tttttttaagcagtggtatcaacgcagagtacnnctggaatgnnggcaatcanntttttttttttttttttttttttttttttt

SEQ ID NO: 3805 - DNA, 84 bp, synthetic construct
  source 1..84: mol_type = other DNA
tttttttaagcagtggtatcaacgcagagtacnnctggaatgnngaatccganntttttttttttttttttttttttttttttt

SEQ ID NO: 3806 - DNA, 84 bp, synthetic construct
  source 1..84: mol_type = other DNA
tttttttaagcagtggtatcaacgcagagtacnnctggaatgnnttacggtgnntttttttttttttttttttttttttttttt

SEQ ID NO: 3807 - DNA, 84 bp, synthetic construct
  source 1..84: mol_type = other DNA
tttttttaagcagtggtatcaacgcagagtacnnctggaatgnncatatcggnntttttttttttttttttttttttttttttt

SEQ ID NO: 3808 - DNA, 84 bp, synthetic construct
  source 1..84: mol_type = other DNA
tttttttaagcagtggtatcaacgcagagtacnnctggaatgnncttcggtanntttttttttttttttttttttttttttttt

SEQ ID NO: 3809 - DNA, 84 bp, synthetic construct
  source 1..84: mol_type = other DNA
tttttttaagcagtggtatcaacgcagagtacnnctggaatgnntcctaacgnntttttttttttttttttttttttttttttt

SEQ ID NO: 3810 - DNA, 84 bp, synthetic construct
  source 1..84: mol_type = other DNA
tttttttaagcagtggtatcaacgcagagtacnnctggaatgnngtaagccanntttttttttttttttttttttttttttttt

SEQ ID NO: 3811 - DNA, 84 bp, synthetic construct
  source 1..84: mol_type = other DNA
tttttttaagcagtggtatcaacgcagagtacnnctggaatgnntaaggtggnntttttttttttttttttttttttttttttt

SEQ ID NO: 3812 - DNA, 84 bp, synthetic construct
  source 1..84: mol_type = other DNA
tttttttaagcagtggtatcaacgcagagtacnnctggaatgnnggtaagctnntttttttttttttttttttttttttttttt

SEQ ID NO: 3813 - DNA, 84 bp, synthetic construct
  source 1..84: mol_type = other DNA
tttttttaagcagtggtatcaacgcagagtacnnctggaatgnntgtgtcganntttttttttttttttttttttttttttttt

SEQ ID NO: 3814 - DNA, 84 bp, synthetic construct
  source 1..84: mol_type = other DNA
tttttttaagcagtggtatcaacgcagagtacnnctggaatgnngagcatganntttttttttttttttttttttttttttttt

SEQ ID NO: 3815 - DNA, 84 bp, synthetic construct
  source 1..84: mol_type = other DNA
tttttttaagcagtggtatcaacgcagagtacnnctggaatgnntcgaagtcnntttttttttttttttttttttttttttttt

SEQ ID NO: 3816 - DNA, 84 bp, synthetic construct
  source 1..84: mol_type = other DNA
tttttttaagcagtggtatcaacgcagagtacnnctggaatgnnggtgaacanntttttttttttttttttttttttttttttt

SEQ ID NO: 3817 - DNA, 84 bp, synthetic construct
  source 1..84: mol_type = other DNA
tttttttaagcagtggtatcaacgcagagtacnnctggaatgnnacatgcacnntttttttttttttttttttttttttttttt

SEQ ID NO: 3818 - DNA, 84 bp, synthetic construct
  source 1..84: mol_type = other DNA
tttttttaagcagtggtatcaacgcagagtacnnctggaatgnnccaacagtnntttttttttttttttttttttttttttttt

SEQ ID NO: 3819 - DNA, 84 bp, synthetic construct
  source 1..84: mol_type = other DNA
tttttttaagcagtggtatcaacgcagagtacnnctggaatgnnagaacagcnntttttttttttttttttttttttttttttt

SEQ ID NO: 3820 - DNA, 84 bp, synthetic construct
  source 1..84: mol_type = other DNA
tttttttaagcagtggtatcaacgcagagtacnnctggaatgnngaacacgtnntttttttttttttttttttttttttttttt

SEQ ID NO: 3821 - DNA, 84 bp, synthetic construct
  source 1..84: mol_type = other DNA
tttttttaagcagtggtatcaacgcagagtacnnctggaatgnnggtcttcanntttttttttttttttttttttttttttttt

SEQ ID NO: 3822 - DNA, 84 bp, synthetic construct
  source 1..84: mol_type = other DNA
tttttttaagcagtggtatcaacgcagagtacnnctggaatgnnaggttcagnntttttttttttttttttttttttttttttt

SEQ ID NO: 3823 - DNA, 84 bp, synthetic construct
  source 1..84: mol_type = other DNA
tttttttaagcagtggtatcaacgcagagtacnnctggaatgnnctagagcanntttttttttttttttttttttttttttttt

SEQ ID NO: 3824 - DNA, 84 bp, synthetic construct
  source 1..84: mol_type = other DNA
tttttttaagcagtggtatcaacgcagagtacnnctggaatgnncttctagcnntttttttttttttttttttttttttttttt

SEQ ID NO: 3825 - DNA, 84 bp, synthetic construct
  source 1..84: mol_type = other DNA
tttttttaagcagtggtatcaacgcagagtacnnctggaatgnngagtaacgnntttttttttttttttttttttttttttttt

SEQ ID NO: 3826 - DNA, 84 bp, synthetic construct
  source 1..84: mol_type = other DNA
tttttttaagcagtggtatcaacgcagagtacnnctggaatgnnctaagaggnntttttttttttttttttttttttttttttt

SEQ ID NO: 3827 - DNA, 84 bp, synthetic construct
  source 1..84: mol_type = other DNA
tttttttaagcagtggtatcaacgcagagtacnnctggaatgnnacgtgtagnntttttttttttttttttttttttttttttt

SEQ ID NO: 3828 - DNA, 84 bp, synthetic construct
  source 1..84: mol_type = other DNA
tttttttaagcagtggtatcaacgcagagtacnnctggaatgnnactacaggnntttttttttttttttttttttttttttttt

SEQ ID NO: 3829 - DNA, 84 bp, synthetic construct
  source 1..84: mol_type = other DNA
tttttttaagcagtggtatcaacgcagagtacnnctggaatgnntacaggtcnntttttttttttttttttttttttttttttt

SEQ ID NO: 3830 - DNA, 84 bp, synthetic construct
  source 1..84: mol_type = other DNA
tttttttaagcagtggtatcaacgcagagtacnnctggaatgnnctcacatgnntttttttttttttttttttttttttttttt

SEQ ID NO: 3831 - DNA, 84 bp, synthetic construct
  source 1..84: mol_type = other DNA
tttttttaagcagtggtatcaacgcagagtacnnctggaatgnnactaggagnntttttttttttttttttttttttttttttt

SEQ ID NO: 3832 - DNA, 84 bp, synthetic construct
  source 1..84: mol_type = other DNA
tttttttaagcagtggtatcaacgcagagtacnnctggaatgnnccatagganntttttttttttttttttttttttttttttt

SEQ ID NO: 3833 - DNA, 84 bp, synthetic construct
  source 1..84: mol_type = other DNA
tttttttaagcagtggtatcaacgcagagtacnnctggaatgnnggagaatcnntttttttttttttttttttttttttttttt

SEQ ID NO: 3834 - DNA, 84 bp, synthetic construct
  source 1..84: mol_type = other DNA
tttttttaagcagtggtatcaacgcagagtacnnctggaatgnngccaagaanntttttttttttttttttttttttttttttt

SEQ ID NO: 3835 - DNA, 84 bp, synthetic construct
  source 1..84: mol_type = other DNA
tttttttaagcagtggtatcaacgcagagtacnnctggaatgnnaaggcaagnntttttttttttttttttttttttttttttt

SEQ ID NO: 3836 - DNA, 84 bp, synthetic construct
  source 1..84: mol_type = other DNA
tttttttaagcagtggtatcaacgcagagtacnnctggaatgnnaatgtcgcnntttttttttttttttttttttttttttttt

SEQ ID NO: 3837 - DNA, 84 bp, synthetic construct
  source 1..84: mol_type = other DNA
tttttttaagcagtggtatcaacgcagagtacnnctggaatgnnatggaaccnntttttttttttttttttttttttttttttt

SEQ ID NO: 3838 - DNA, 84 bp, synthetic construct
  source 1..84: mol_type = other DNA
tttttttaagcagtggtatcaacgcagagtacnnctggaatgnnagaggcatnntttttttttttttttttttttttttttttt

SEQ ID NO: 3839 - DNA, 84 bp, synthetic construct
  source 1..84: mol_type = other DNA
tttttttaagcagtggtatcaacgcagagtacnnctggaatgnntgcatagcnntttttttttttttttttttttttttttttt

SEQ ID NO: 3840 - DNA, 84 bp, synthetic construct
  source 1..84: mol_type = other DNA
tttttttaagcagtggtatcaacgcagagtacnnctggaatgnnctaacgganntttttttttttttttttttttttttttttt

SEQ ID NO: 3841 - DNA, 84 bp, synthetic construct
  source 1..84: mol_type = other DNA
tttttttaagcagtggtatcaacgcagagtacnnctggaatgnntatcgaggnntttttttttttttttttttttttttttttt

SEQ ID NO: 3842 - DNA, 84 bp, synthetic construct
  source 1..84: mol_type = other DNA
tttttttaagcagtggtatcaacgcagagtacnnctggaatgnncatagcctnntttttttttttttttttttttttttttttt

SEQ ID NO: 3843 - DNA, 84 bp, synthetic construct
  source 1..84: mol_type = other DNA
tttttttaagcagtggtatcaacgcagagtacnnctggaatgnnatcgagacnntttttttttttttttttttttttttttttt

SEQ ID NO: 3844 - DNA, 84 bp, synthetic construct
  source 1..84: mol_type = other DNA
tttttttaagcagtggtatcaacgcagagtacnnctggaatgnnggaagagtnntttttttttttttttttttttttttttttt

SEQ ID NO: 3845 - DNA, 84 bp, synthetic construct
  source 1..84: mol_type = other DNA
tttttttaagcagtggtatcaacgcagagtacnnctggaatgnnccaagtagnntttttttttttttttttttttttttttttt

SEQ ID NO: 3846 - DNA, 84 bp, synthetic construct
  source 1..84: mol_type = other DNA
tttttttaagcagtggtatcaacgcagagtacnnctggaatgnnctgaacagnntttttttttttttttttttttttttttttt

SEQ ID NO: 3847 - DNA, 84 bp, synthetic construct
  source 1..84: mol_type = other DNA
tttttttaagcagtggtatcaacgcagagtacnnctggaatgnngtaggttcnntttttttttttttttttttttttttttttt

SEQ ID NO: 3848 - DNA, 84 bp, synthetic construct
  source 1..84: mol_type = other DNA
tttttttaagcagtggtatcaacgcagagtacnnctggaatgnngtatggacnntttttttttttttttttttttttttttttt

SEQ ID NO: 3849 - DNA, 84 bp, synthetic construct
  source 1..84: mol_type = other DNA
tttttttaagcagtggtatcaacgcagagtacnnctggaatgnntcgcaacanntttttttttttttttttttttttttttttt

SEQ ID NO: 3850 - DNA, 84 bp, synthetic construct
  source 1..84: mol_type = other DNA
tttttttaagcagtggtatcaacgcagagtacnnctggaatgnnccgctaatnntttttttttttttttttttttttttttttt

SEQ ID NO: 3851 - DNA, 84 bp, synthetic construct
  source 1..84: mol_type = other DNA
tttttttaagcagtggtatcaacgcagagtacnnctggaatgnngattcgcanntttttttttttttttttttttttttttttt

SEQ ID NO: 3852 - DNA, 84 bp, synthetic construct
  source 1..84: mol_type = other DNA
tttttttaagcagtggtatcaacgcagagtacnnctggaatgnncgatggaanntttttttttttttttttttttttttttttt

SEQ ID NO: 3853 - DNA, 84 bp, synthetic construct
  source 1..84: mol_type = other DNA
tttttttaagcagtggtatcaacgcagagtacnnctggaatgnnagcaagganntttttttttttttttttttttttttttttt

SEQ ID NO: 3854 - DNA, 84 bp, synthetic construct
  source 1..84: mol_type = other DNA
tttttttaagcagtggtatcaacgcagagtacnnctggaatgnncgtagcaanntttttttttttttttttttttttttttttt

SEQ ID NO: 3855 - DNA, 84 bp, synthetic construct
  source 1..84: mol_type = other DNA
tttttttaagcagtggtatcaacgcagagtacnnctggaatgnntggcagtanntttttttttttttttttttttttttttttt

SEQ ID NO: 3856 - DNA, 84 bp, synthetic construct
  source 1..84: mol_type = other DNA
tttttttaagcagtggtatcaacgcagagtacnnctggaatgnncggtagttnntttttttttttttttttttttttttttttt

SEQ ID NO: 3857 - DNA, 84 bp, synthetic construct
  source 1..84: mol_type = other DNA
tttttttaagcagtggtatcaacgcagagtacnnctggaatgnntgacttcgnntttttttttttttttttttttttttttttt

SEQ ID NO: 3858 - DNA, 84 bp, synthetic construct
  source 1..84: mol_type = other DNA
tttttttaagcagtggtatcaacgcagagtacnnctggaatgnngagtgcaanntttttttttttttttttttttttttttttt

SEQ ID NO: 3859 - DNA, 84 bp, synthetic construct
  source 1..84: mol_type = other DNA
tttttttaagcagtggtatcaacgcagagtacnnctggaatgnnacggtaacnntttttttttttttttttttttttttttttt

SEQ ID NO: 3860 - DNA, 84 bp, synthetic construct
  source 1..84: mol_type = other DNA
tttttttaagcagtggtatcaacgcagagtacnnctggaatgnnaagtggtgnntttttttttttttttttttttttttttttt

SEQ ID NO: 3861 - DNA, 84 bp, synthetic construct
  source 1..84: mol_type = other DNA
tttttttaagcagtggtatcaacgcagagtacnnctggaatgnnggagacaanntttttttttttttttttttttttttttttt

SEQ ID NO: 3862 - DNA, 84 bp, synthetic construct
  source 1..84: mol_type = other DNA
tttttttaagcagtggtatcaacgcagagtacnnctggaatgnntcaaggacnntttttttttttttttttttttttttttttt

SEQ ID NO: 3863 - DNA, 84 bp, synthetic construct
  source 1..84: mol_type = other DNA
tttttttaagcagtggtatcaacgcagagtacnnctggaatgnnaagagagcnntttttttttttttttttttttttttttttt

SEQ ID NO: 3864 - DNA, 84 bp, synthetic construct
  source 1..84: mol_type = other DNA
tttttttaagcagtggtatcaacgcagagtacnnctggaatgnncgagagatnntttttttttttttttttttttttttttttt

SEQ ID NO: 3865 - DNA, 84 bp, synthetic construct
  source 1..84: mol_type = other DNA
tttttttaagcagtggtatcaacgcagagtacnnctggaatgnnacagatggnntttttttttttttttttttttttttttttt

SEQ ID NO: 3866 - DNA, 84 bp, synthetic construct
  source 1..84: mol_type = other DNA
tttttttaagcagtggtatcaacgcagagtacnnctggaatgnnaggagtcanntttttttttttttttttttttttttttttt

SEQ ID NO: 3867 - DNA, 84 bp, synthetic construct
  source 1..84: mol_type = other DNA
tttttttaagcagtggtatcaacgcagagtacnnctggaatgnncgtgttacnntttttttttttttttttttttttttttttt

SEQ ID NO: 3868 - DNA, 84 bp, synthetic construct
  source 1..84: mol_type = other DNA
tttttttaagcagtggtatcaacgcagagtacnnctggaatgnntagtgtgcnntttttttttttttttttttttttttttttt

SEQ ID NO: 3869 - DNA, 84 bp, synthetic construct
  source 1..84: mol_type = other DNA
tttttttaagcagtggtatcaacgcagagtacnnctggaatgnnctcatgacnntttttttttttttttttttttttttttttt

SEQ ID NO: 3870 - DNA, 84 bp, synthetic construct
  source 1..84: mol_type = other DNA
tttttttaagcagtggtatcaacgcagagtacnnctggaatgnngtatccagnntttttttttttttttttttttttttttttt

SEQ ID NO: 3871 - DNA, 84 bp, synthetic construct
  source 1..84: mol_type = other DNA
tttttttaagcagtggtatcaacgcagagtacnnctggaatgnnacgcctatnntttttttttttttttttttttttttttttt

SEQ ID NO: 3872 - DNA, 84 bp, synthetic construct
  source 1..84: mol_type = other DNA
tttttttaagcagtggtatcaacgcagagtacnnctggaatgnnaacgacctnntttttttttttttttttttttttttttttt

SEQ ID NO: 3873 - DNA, 84 bp, synthetic construct
  source 1..84: mol_type = other DNA
tttttttaagcagtggtatcaacgcagagtacnnctggaatgnnatcaggctnntttttttttttttttttttttttttttttt

SEQ ID NO: 3874 - DNA, 84 bp, synthetic construct
  source 1..84: mol_type = other DNA
tttttttaagcagtggtatcaacgcagagtacnnctggaatgnncaagttcgnntttttttttttttttttttttttttttttt

SEQ ID NO: 3875 - DNA, 84 bp, synthetic construct
  source 1..84: mol_type = other DNA
tttttttaagcagtggtatcaacgcagagtacnnctggaatgnntagccaganntttttttttttttttttttttttttttttt

SEQ ID NO: 3876 - DNA, 84 bp, synthetic construct
  source 1..84: mol_type = other DNA
tttttttaagcagtggtatcaacgcagagtacnnctggaatgnncaatcacgnntttttttttttttttttttttttttttttt

SEQ ID NO: 3877 - DNA, 84 bp, synthetic construct
  source 1..84: mol_type = other DNA
tttttttaagcagtggtatcaacgcagagtacnnctggaatgnngcaacaagnntttttttttttttttttttttttttttttt

SEQ ID NO: 3878 - DNA, 84 bp, synthetic construct
  source 1..84: mol_type = other DNA
tttttttaagcagtggtatcaacgcagagtacnnctggaatgnncacgacaanntttttttttttttttttttttttttttttt

SEQ ID NO: 3879 - DNA, 84 bp, synthetic construct
  source 1..84: mol_type = other DNA
tttttttaagcagtggtatcaacgcagagtacnnctggaatgnntacggaganntttttttttttttttttttttttttttttt

SEQ ID NO: 3880 - DNA, 84 bp, synthetic construct
  source 1..84: mol_type = other DNA
tttttttaagcagtggtatcaacgcagagtacnnctggaatgnncgacaaganntttttttttttttttttttttttttttttt

SEQ ID NO: 3881 - DNA, 84 bp, synthetic construct
  source 1..84: mol_type = other DNA
tttttttaagcagtggtatcaacgcagagtacnnctggaatgnncgaagtganntttttttttttttttttttttttttttttt

SEQ ID NO: 3882 - DNA, 84 bp, synthetic construct
  source 1..84: mol_type = other DNA
tttttttaagcagtggtatcaacgcagagtacnnctggaatgnnagctggtanntttttttttttttttttttttttttttttt

SEQ ID NO: 3883 - DNA, 84 bp, synthetic construct
  source 1..84: mol_type = other DNA
tttttttaagcagtggtatcaacgcagagtacnnctggaatgnnaactaggcnntttttttttttttttttttttttttttttt

SEQ ID NO: 3884 - DNA, 84 bp, synthetic construct
  source 1..84: mol_type = other DNA
tttttttaagcagtggtatcaacgcagagtacnnctggaatgnncagcaagtnntttttttttttttttttttttttttttttt

SEQ ID NO: 3885 - DNA, 84 bp, synthetic construct
  source 1..84: mol_type = other DNA
tttttttaagcagtggtatcaacgcagagtacnnctggaatgnnacgaggtanntttttttttttttttttttttttttttttt

SEQ ID NO: 3886 - DNA, 84 bp, synthetic construct
  source 1..84: mol_type = other DNA
tttttttaagcagtggtatcaacgcagagtacnnctggaatgnncatcttccnntttttttttttttttttttttttttttttt

SEQ ID NO: 3887 - DNA, 84 bp, synthetic construct
  source 1..84: mol_type = other DNA
tttttttaagcagtggtatcaacgcagagtacnnctggaatgnncctgaatcnntttttttttttttttttttttttttttttt

SEQ ID NO: 3888 - DNA, 84 bp, synthetic construct
  source 1..84: mol_type = other DNA
tttttttaagcagtggtatcaacgcagagtacnnctggaatgnntgcagactnntttttttttttttttttttttttttttttt

SEQ ID NO: 3889 - DNA, 84 bp, synthetic construct
  source 1..84: mol_type = other DNA
tttttttaagcagtggtatcaacgcagagtacnnctggaatgnnagatgtggnntttttttttttttttttttttttttttttt

SEQ ID NO: 3890 - DNA, 84 bp, synthetic construct
  source 1..84: mol_type = other DNA
tttttttaagcagtggtatcaacgcagagtacnnctggaatgnnagttcgacnntttttttttttttttttttttttttttttt

SEQ ID NO: 3891 - DNA, 84 bp, synthetic construct
  source 1..84: mol_type = other DNA
tttttttaagcagtggtatcaacgcagagtacnnctggaatgnnacaacctcnntttttttttttttttttttttttttttttt

SEQ ID NO: 3892 - DNA, 84 bp, synthetic construct
  source 1..84: mol_type = other DNA
tttttttaagcagtggtatcaacgcagagtacnnctggaatgnncatggtagnntttttttttttttttttttttttttttttt

SEQ ID NO: 3893 - DNA, 84 bp, synthetic construct
  source 1..84: mol_type = other DNA
tttttttaagcagtggtatcaacgcagagtacnnctggaatgnncgtatctcnntttttttttttttttttttttttttttttt

SEQ ID NO: 3894 - DNA, 84 bp, synthetic construct
  source 1..84: mol_type = other DNA
tttttttaagcagtggtatcaacgcagagtacnnctggaatgnncctagttcnntttttttttttttttttttttttttttttt

SEQ ID NO: 3895 - DNA, 84 bp, synthetic construct
  source 1..84: mol_type = other DNA
tttttttaagcagtggtatcaacgcagagtacnnctggaatgnncaagagtcnntttttttttttttttttttttttttttttt

SEQ ID NO: 3896 - DNA, 84 bp, synthetic construct
  source 1..84: mol_type = other DNA
tttttttaagcagtggtatcaacgcagagtacnnacgacttgnnaatcggcanntttttttttttttttttttttttttttttt

SEQ ID NO: 3897 - DNA, 84 bp, synthetic construct
  source 1..84: mol_type = other DNA
tttttttaagcagtggtatcaacgcagagtacnnacgacttgnntacggcatnntttttttttttttttttttttttttttttt

SEQ ID NO: 3898 - DNA, 84 bp, synthetic construct
  source 1..84: mol_type = other DNA
tttttttaagcagtggtatcaacgcagagtacnnacgacttgnnttggatcgnntttttttttttttttttttttttttttttt

SEQ ID NO: 3899 - DNA, 84 bp, synthetic construct
  source 1..84: mol_type = other DNA
tttttttaagcagtggtatcaacgcagagtacnnacgacttgnntggaacganntttttttttttttttttttttttttttttt

SEQ ID NO: 3900 - DNA, 84 bp, synthetic construct
  source 1..84: mol_type = other DNA
tttttttaagcagtggtatcaacgcagagtacnnacgacttgnnggcaatcanntttttttttttttttttttttttttttttt

SEQ ID NO: 3901 - DNA, 84 bp, synthetic construct
  source 1..84: mol_type = other DNA
tttttttaagcagtggtatcaacgcagagtacnnacgacttgnngaatccganntttttttttttttttttttttttttttttt

SEQ ID NO: 3902 - DNA, 84 bp, synthetic construct
  source 1..84: mol_type = other DNA
tttttttaagcagtggtatcaacgcagagtacnnacgacttgnnttacggtgnntttttttttttttttttttttttttttttt

SEQ ID NO: 3903 - DNA, 84 bp, synthetic construct
  source 1..84: mol_type = other DNA
tttttttaagcagtggtatcaacgcagagtacnnacgacttgnncatatcggnntttttttttttttttttttttttttttttt

SEQ ID NO: 3904 - DNA, 84 bp, synthetic construct
  source 1..84: mol_type = other DNA
tttttttaagcagtggtatcaacgcagagtacnnacgacttgnncttcggtanntttttttttttttttttttttttttttttt

SEQ ID NO: 3905 - DNA, 84 bp, synthetic construct
  source 1..84: mol_type = other DNA
tttttttaagcagtggtatcaacgcagagtacnnacgacttgnntcctaacgnntttttttttttttttttttttttttttttt

SEQ ID NO: 3906 - DNA, 84 bp, synthetic construct
  source 1..84: mol_type = other DNA
tttttttaagcagtggtatcaacgcagagtacnnacgacttgnngtaagccanntttttttttttttttttttttttttttttt

SEQ ID NO: 3907 - DNA, 84 bp, synthetic construct
  source 1..84: mol_type = other DNA
tttttttaagcagtggtatcaacgcagagtacnnacgacttgnntaaggtggnntttttttttttttttttttttttttttttt

SEQ ID NO: 3908 - DNA, 84 bp, synthetic construct
  source 1..84: mol_type = other DNA
tttttttaagcagtggtatcaacgcagagtacnnacgacttgnnggtaagctnntttttttttttttttttttttttttttttt

SEQ ID NO: 3909 - DNA, 84 bp, synthetic construct
  source 1..84: mol_type = other DNA
tttttttaagcagtggtatcaacgcagagtacnnacgacttgnntgtgtcganntttttttttttttttttttttttttttttt

SEQ ID NO: 3910 - DNA, 84 bp, synthetic construct
  source 1..84: mol_type = other DNA
tttttttaagcagtggtatcaacgcagagtacnnacgacttgnngagcatganntttttttttttttttttttttttttttttt

SEQ ID NO: 3911 - DNA, 84 bp, synthetic construct
  source 1..84: mol_type = other DNA
tttttttaagcagtggtatcaacgcagagtacnnacgacttgnntcgaagtcnntttttttttttttttttttttttttttttt

SEQ ID NO: 3912 - DNA, 84 bp, synthetic construct
  source 1..84: mol_type = other DNA
tttttttaagcagtggtatcaacgcagagtacnnacgacttgnnggtgaacanntttttttttttttttttttttttttttttt

SEQ ID NO: 3913 - DNA, 84 bp, synthetic construct
  source 1..84: mol_type = other DNA
tttttttaagcagtggtatcaacgcagagtacnnacgacttgnnacatgcacnntttttttttttttttttttttttttttttt

SEQ ID NO: 3914 - DNA, 84 bp, synthetic construct
  source 1..84: mol_type = other DNA
tttttttaagcagtggtatcaacgcagagtacnnacgacttgnnccaacagtnntttttttttttttttttttttttttttttt

SEQ ID NO: 3915 - DNA, 84 bp, synthetic construct
  source 1..84: mol_type = other DNA
tttttttaagcagtggtatcaacgcagagtacnnacgacttgnnagaacagcnntttttttttttttttttttttttttttttt

SEQ ID NO: 3916 - DNA, 84 bp, synthetic construct
  source 1..84: mol_type = other DNA
tttttttaagcagtggtatcaacgcagagtacnnacgacttgnngaacacgtnntttttttttttttttttttttttttttttt

SEQ ID NO: 3917 - DNA, 84 bp, synthetic construct
  source 1..84: mol_type = other DNA
tttttttaagcagtggtatcaacgcagagtacnnacgacttgnnggtcttcanntttttttttttttttttttttttttttttt

SEQ ID NO: 3918 - DNA, 84 bp, synthetic construct
  source 1..84: mol_type = other DNA
tttttttaagcagtggtatcaacgcagagtacnnacgacttgnnaggttcagnntttttttttttttttttttttttttttttt

SEQ ID NO: 3919 - DNA, 84 bp, synthetic construct
  source 1..84: mol_type = other DNA
tttttttaagcagtggtatcaacgcagagtacnnacgacttgnnctagagcanntttttttttttttttttttttttttttttt

SEQ ID NO: 3920 - DNA, 84 bp, synthetic construct
  source 1..84: mol_type = other DNA
tttttttaagcagtggtatcaacgcagagtacnnacgacttgnncttctagcnntttttttttttttttttttttttttttttt

SEQ ID NO: 3921 - DNA, 84 bp, synthetic construct
  source 1..84: mol_type = other DNA
tttttttaagcagtggtatcaacgcagagtacnnacgacttgnngagtaacgnntttttttttttttttttttttttttttttt

SEQ ID NO: 3922 - DNA, 84 bp, synthetic construct
  source 1..84: mol_type = other DNA
tttttttaagcagtggtatcaacgcagagtacnnacgacttgnnctaagaggnntttttttttttttttttttttttttttttt

SEQ ID NO: 3923 - DNA, 84 bp, synthetic construct
  source 1..84: mol_type = other DNA
tttttttaagcagtggtatcaacgcagagtacnnacgacttgnnacgtgtagnntttttttttttttttttttttttttttttt

SEQ ID NO: 3924 - DNA, 84 bp, synthetic construct
  source 1..84: mol_type = other DNA
tttttttaagcagtggtatcaacgcagagtacnnacgacttgnnactacaggnntttttttttttttttttttttttttttttt

SEQ ID NO: 3925 - DNA, 84 bp, synthetic construct
  source 1..84: mol_type = other DNA
tttttttaagcagtggtatcaacgcagagtacnnacgacttgnntacaggtcnntttttttttttttttttttttttttttttt

SEQ ID NO: 3926 - DNA, 84 bp, synthetic construct
  source 1..84: mol_type = other DNA
tttttttaagcagtggtatcaacgcagagtacnnacgacttgnnctcacatgnntttttttttttttttttttttttttttttt

SEQ ID NO: 3927 - DNA, 84 bp, synthetic construct
  source 1..84: mol_type = other DNA
tttttttaagcagtggtatcaacgcagagtacnnacgacttgnnactaggagnntttttttttttttttttttttttttttttt

SEQ ID NO: 3928 - DNA, 84 bp, synthetic construct
  source 1..84: mol_type = other DNA
tttttttaagcagtggtatcaacgcagagtacnnacgacttgnnccatagganntttttttttttttttttttttttttttttt

SEQ ID NO: 3929 - DNA, 84 bp, synthetic construct
  source 1..84: mol_type = other DNA
tttttttaagcagtggtatcaacgcagagtacnnacgacttgnnggagaatcnntttttttttttttttttttttttttttttt

SEQ ID NO: 3930 - DNA, 84 bp, synthetic construct
  source 1..84: mol_type = other DNA
tttttttaagcagtggtatcaacgcagagtacnnacgacttgnngccaagaanntttttttttttttttttttttttttttttt

SEQ ID NO: 3931 - DNA, 84 bp, synthetic construct
  source 1..84: mol_type = other DNA
tttttttaagcagtggtatcaacgcagagtacnnacgacttgnnaaggcaagnntttttttttttttttttttttttttttttt

SEQ ID NO: 3932 - DNA, 84 bp, synthetic construct
  source 1..84: mol_type = other DNA
tttttttaagcagtggtatcaacgcagagtacnnacgacttgnnaatgtcgcnntttttttttttttttttttttttttttttt

SEQ ID NO: 3933 - DNA, 84 bp, synthetic construct
  source 1..84: mol_type = other DNA
tttttttaagcagtggtatcaacgcagagtacnnacgacttgnnatggaaccnntttttttttttttttttttttttttttttt

SEQ ID NO: 3934 - DNA, 84 bp, synthetic construct
  source 1..84: mol_type = other DNA
tttttttaagcagtggtatcaacgcagagtacnnacgacttgnnagaggcatnntttttttttttttttttttttttttttttt

SEQ ID NO: 3935 - DNA, 84 bp, synthetic construct
  source 1..84: mol_type = other DNA
tttttttaagcagtggtatcaacgcagagtacnnacgacttgnntgcatagcnntttttttttttttttttttttttttttttt

SEQ ID NO: 3936 - DNA, 84 bp, synthetic construct
  source 1..84: mol_type = other DNA
tttttttaagcagtggtatcaacgcagagtacnnacgacttgnnctaacgganntttttttttttttttttttttttttttttt

SEQ ID NO: 3937 - DNA, 84 bp, synthetic construct
  source 1..84: mol_type = other DNA
tttttttaagcagtggtatcaacgcagagtacnnacgacttgnntatcgaggnntttttttttttttttttttttttttttttt

SEQ ID NO: 3938 - DNA, 84 bp, synthetic construct
  source 1..84: mol_type = other DNA
tttttttaagcagtggtatcaacgcagagtacnnacgacttgnncatagcctnntttttttttttttttttttttttttttttt

SEQ ID NO: 3939 - DNA, 84 bp, synthetic construct
  source 1..84: mol_type = other DNA
tttttttaagcagtggtatcaacgcagagtacnnacgacttgnnatcgagacnntttttttttttttttttttttttttttttt

SEQ ID NO: 3940 - DNA, 84 bp, synthetic construct
  source 1..84: mol_type = other DNA
tttttttaagcagtggtatcaacgcagagtacnnacgacttgnnggaagagtnntttttttttttttttttttttttttttttt

SEQ ID NO: 3941 - DNA, 84 bp, synthetic construct
  source 1..84: mol_type = other DNA
tttttttaagcagtggtatcaacgcagagtacnnacgacttgnnccaagtagnntttttttttttttttttttttttttttttt

SEQ ID NO: 3942 - DNA, 84 bp, synthetic construct
  source 1..84: mol_type = other DNA
tttttttaagcagtggtatcaacgcagagtacnnacgacttgnnctgaacagnntttttttttttttttttttttttttttttt

SEQ ID NO: 3943 - DNA, 84 bp, synthetic construct
  source 1..84: mol_type = other DNA
tttttttaagcagtggtatcaacgcagagtacnnacgacttgnngtaggttcnntttttttttttttttttttttttttttttt

SEQ ID NO: 3944 - DNA, 84 bp, synthetic construct
  source 1..84: mol_type = other DNA
tttttttaagcagtggtatcaacgcagagtacnnacgacttgnngtatggacnntttttttttttttttttttttttttttttt

SEQ ID NO: 3945 - DNA, 84 bp, synthetic construct
  source 1..84: mol_type = other DNA
tttttttaagcagtggtatcaacgcagagtacnnacgacttgnntcgcaacanntttttttttttttttttttttttttttttt

SEQ ID NO: 3946 - DNA, 84 bp, synthetic construct
  source 1..84: mol_type = other DNA
tttttttaagcagtggtatcaacgcagagtacnnacgacttgnnccgctaatnntttttttttttttttttttttttttttttt

SEQ ID NO: 3947 - DNA, 84 bp, synthetic construct
  source 1..84: mol_type = other DNA
tttttttaagcagtggtatcaacgcagagtacnnacgacttgnngattcgcanntttttttttttttttttttttttttttttt

SEQ ID NO: 3948 - DNA, 84 bp, synthetic construct
  source 1..84: mol_type = other DNA
tttttttaagcagtggtatcaacgcagagtacnnacgacttgnncgatggaanntttttttttttttttttttttttttttttt

SEQ ID NO: 3949 - DNA, 84 bp, synthetic construct
  source 1..84: mol_type = other DNA
tttttttaagcagtggtatcaacgcagagtacnnacgacttgnnagcaagganntttttttttttttttttttttttttttttt

SEQ ID NO: 3950 - DNA, 84 bp, synthetic construct
  source 1..84: mol_type = other DNA
tttttttaagcagtggtatcaacgcagagtacnnacgacttgnncgtagcaanntttttttttttttttttttttttttttttt

SEQ ID NO: 3951 - DNA, 84 bp, synthetic construct
  source 1..84: mol_type = other DNA
tttttttaagcagtggtatcaacgcagagtacnnacgacttgnntggcagtanntttttttttttttttttttttttttttttt

SEQ ID NO: 3952 - DNA, 84 bp, synthetic construct
  source 1..84: mol_type = other DNA
tttttttaagcagtggtatcaacgcagagtacnnacgacttgnncggtagttnntttttttttttttttttttttttttttttt

SEQ ID NO: 3953 - DNA, 84 bp, synthetic construct
  source 1..84: mol_type = other DNA
tttttttaagcagtggtatcaacgcagagtacnnacgacttgnntgacttcgnntttttttttttttttttttttttttttttt

SEQ ID NO: 3954 - DNA, 84 bp, synthetic construct
  source 1..84: mol_type = other DNA
tttttttaagcagtggtatcaacgcagagtacnnacgacttgnngagtgcaanntttttttttttttttttttttttttttttt

SEQ ID NO: 3955 - DNA, 84 bp, synthetic construct
  source 1..84: mol_type = other DNA
tttttttaagcagtggtatcaacgcagagtacnnacgacttgnnacggtaacnntttttttttttttttttttttttttttttt

SEQ ID NO: 3956 - DNA, 84 bp, synthetic construct
  source 1..84: mol_type = other DNA
tttttttaagcagtggtatcaacgcagagtacnnacgacttgnnaagtggtgnntttttttttttttttttttttttttttttt

SEQ ID NO: 3957 - DNA, 84 bp, synthetic construct
  source 1..84: mol_type = other DNA
tttttttaagcagtggtatcaacgcagagtacnnacgacttgnnggagacaanntttttttttttttttttttttttttttttt

SEQ ID NO: 3958 - DNA, 84 bp, synthetic construct
  source 1..84: mol_type = other DNA
tttttttaagcagtggtatcaacgcagagtacnnacgacttgnntcaaggacnntttttttttttttttttttttttttttttt

SEQ ID NO: 3959 - DNA, 84 bp, synthetic construct
  source 1..84: mol_type = other DNA
tttttttaagcagtggtatcaacgcagagtacnnacgacttgnnaagagagcnntttttttttttttttttttttttttttttt

SEQ ID NO: 3960 - DNA, 84 bp, synthetic construct
  source 1..84: mol_type = other DNA
tttttttaagcagtggtatcaacgcagagtacnnacgacttgnncgagagatnntttttttttttttttttttttttttttttt

SEQ ID NO: 3961 - DNA, 84 bp, synthetic construct
  source 1..84: mol_type = other DNA
tttttttaagcagtggtatcaacgcagagtacnnacgacttgnnacagatggnntttttttttttttttttttttttttttttt

SEQ ID NO: 3962 - DNA, 84 bp, synthetic construct
  source 1..84: mol_type = other DNA
tttttttaagcagtggtatcaacgcagagtacnnacgacttgnnaggagtcanntttttttttttttttttttttttttttttt

SEQ ID NO: 3963 - DNA, 84 bp, synthetic construct
  source 1..84: mol_type = other DNA
tttttttaagcagtggtatcaacgcagagtacnnacgacttgnncgtgttacnntttttttttttttttttttttttttttttt

SEQ ID NO: 3964 - DNA, 84 bp, synthetic construct
  source 1..84: mol_type = other DNA
tttttttaagcagtggtatcaacgcagagtacnnacgacttgnntagtgtgcnntttttttttttttttttttttttttttttt

SEQ ID NO: 3965 - DNA, 84 bp, synthetic construct
  source 1..84: mol_type = other DNA
tttttttaagcagtggtatcaacgcagagtacnnacgacttgnnctcatgacnntttttttttttttttttttttttttttttt

SEQ ID NO: 3966 - DNA, 84 bp, synthetic construct
  source 1..84: mol_type = other DNA
tttttttaagcagtggtatcaacgcagagtacnnacgacttgnngtatccagnntttttttttttttttttttttttttttttt

SEQ ID NO: 3967 - DNA, 84 bp, synthetic construct
  source 1..84: mol_type = other DNA
tttttttaagcagtggtatcaacgcagagtacnnacgacttgnnacgcctatnntttttttttttttttttttttttttttttt

SEQ ID NO: 3968 - DNA, 84 bp, synthetic construct
  source 1..84: mol_type = other DNA
tttttttaagcagtggtatcaacgcagagtacnnacgacttgnnaacgacctnntttttttttttttttttttttttttttttt

SEQ ID NO: 3969 - DNA, 84 bp, synthetic construct
  source 1..84: mol_type = other DNA
tttttttaagcagtggtatcaacgcagagtacnnacgacttgnnatcaggctnntttttttttttttttttttttttttttttt

SEQ ID NO: 3970 - DNA, 84 bp, synthetic construct
  source 1..84: mol_type = other DNA
tttttttaagcagtggtatcaacgcagagtacnnacgacttgnncaagttcgnntttttttttttttttttttttttttttttt

SEQ ID NO: 3971 - DNA, 84 bp, synthetic construct
  source 1..84: mol_type = other DNA
tttttttaagcagtggtatcaacgcagagtacnnacgacttgnntagccaganntttttttttttttttttttttttttttttt

SEQ ID NO: 3972 - DNA, 84 bp, synthetic construct
  source 1..84: mol_type = other DNA
tttttttaagcagtggtatcaacgcagagtacnnacgacttgnncaatcacgnntttttttttttttttttttttttttttttt

SEQ ID NO: 3973 - DNA, 84 bp, synthetic construct
  source 1..84: mol_type = other DNA
tttttttaagcagtggtatcaacgcagagtacnnacgacttgnngcaacaagnntttttttttttttttttttttttttttttt

SEQ ID NO: 3974 - DNA, 84 bp, synthetic construct
  source 1..84: mol_type = other DNA
tttttttaagcagtggtatcaacgcagagtacnnacgacttgnncacgacaanntttttttttttttttttttttttttttttt

SEQ ID NO: 3975 - DNA, 84 bp, synthetic construct
  source 1..84: mol_type = other DNA
tttttttaagcagtggtatcaacgcagagtacnnacgacttgnntacggaganntttttttttttttttttttttttttttttt

SEQ ID NO: 3976 - DNA, 84 bp, synthetic construct
  source 1..84: mol_type = other DNA
tttttttaagcagtggtatcaacgcagagtacnnacgacttgnncgacaaganntttttttttttttttttttttttttttttt

SEQ ID NO: 3977 - DNA, 84 bp, synthetic construct
  source 1..84: mol_type = other DNA
tttttttaagcagtggtatcaacgcagagtacnnacgacttgnncgaagtganntttttttttttttttttttttttttttttt

SEQ ID NO: 3978 - DNA, 84 bp, synthetic construct
  source 1..84: mol_type = other DNA
tttttttaagcagtggtatcaacgcagagtacnnacgacttgnnagctggtanntttttttttttttttttttttttttttttt

SEQ ID NO: 3979 - DNA, 84 bp, synthetic construct
  source 1..84: mol_type = other DNA
tttttttaagcagtggtatcaacgcagagtacnnacgacttgnnaactaggcnntttttttttttttttttttttttttttttt

SEQ ID NO: 3980 - DNA, 84 bp, synthetic construct
  source 1..84: mol_type = other DNA
tttttttaagcagtggtatcaacgcagagtacnnacgacttgnncagcaagtnntttttttttttttttttttttttttttttt

SEQ ID NO: 3981 - DNA, 84 bp, synthetic construct
  source 1..84: mol_type = other DNA
tttttttaagcagtggtatcaacgcagagtacnnacgacttgnnacgaggtanntttttttttttttttttttttttttttttt

SEQ ID NO: 3982 - DNA, 84 bp, synthetic construct
  source 1..84: mol_type = other DNA
tttttttaagcagtggtatcaacgcagagtacnnacgacttgnncatcttccnntttttttttttttttttttttttttttttt

SEQ ID NO: 3983 - DNA, 84 bp, synthetic construct
  source 1..84: mol_type = other DNA
tttttttaagcagtggtatcaacgcagagtacnnacgacttgnncctgaatcnntttttttttttttttttttttttttttttt

SEQ ID NO: 3984 - DNA, 84 bp, synthetic construct
  source 1..84: mol_type = other DNA
tttttttaagcagtggtatcaacgcagagtacnnacgacttgnntgcagactnntttttttttttttttttttttttttttttt

SEQ ID NO: 3985 - DNA, 84 bp, synthetic construct
  source 1..84: mol_type = other DNA
tttttttaagcagtggtatcaacgcagagtacnnacgacttgnnagatgtggnntttttttttttttttttttttttttttttt

SEQ ID NO: 3986 - DNA, 84 bp, synthetic construct
  source 1..84: mol_type = other DNA
tttttttaagcagtggtatcaacgcagagtacnnacgacttgnnagttcgacnntttttttttttttttttttttttttttttt

SEQ ID NO: 3987 - DNA, 84 bp, synthetic construct
  source 1..84: mol_type = other DNA
tttttttaagcagtggtatcaacgcagagtacnnacgacttgnnacaacctcnntttttttttttttttttttttttttttttt

SEQ ID NO: 3988 - DNA, 84 bp, synthetic construct
  source 1..84: mol_type = other DNA
tttttttaagcagtggtatcaacgcagagtacnnacgacttgnncatggtagnntttttttttttttttttttttttttttttt

SEQ ID NO: 3989 - DNA, 84 bp, synthetic construct
  source 1..84: mol_type = other DNA
tttttttaagcagtggtatcaacgcagagtacnnacgacttgnncgtatctcnntttttttttttttttttttttttttttttt

SEQ ID NO: 3990 - DNA, 84 bp, synthetic construct
  source 1..84: mol_type = other DNA
tttttttaagcagtggtatcaacgcagagtacnnacgacttgnncctagttcnntttttttttttttttttttttttttttttt

SEQ ID NO: 3991 - DNA, 84 bp, synthetic construct
  source 1..84: mol_type = other DNA
tttttttaagcagtggtatcaacgcagagtacnnacgacttgnncaagagtcnntttttttttttttttttttttttttttttt

SEQ ID NO: 3992 - DNA, 84 bp, synthetic construct
  source 1..84: mol_type = other DNA
tttttttaagcagtggtatcaacgcagagtacnngttcgagannaatcggcanntttttttttttttttttttttttttttttt

SEQ ID NO: 3993 - DNA, 84 bp, synthetic construct
  source 1..84: mol_type = other DNA
tttttttaagcagtggtatcaacgcagagtacnngttcgaganntacggcatnntttttttttttttttttttttttttttttt

SEQ ID NO: 3994 - DNA, 84 bp, synthetic construct
  source 1..84: mol_type = other DNA
tttttttaagcagtggtatcaacgcagagtacnngttcgagannttggatcgnntttttttttttttttttttttttttttttt

SEQ ID NO: 3995 - DNA, 84 bp, synthetic construct
  source 1..84: mol_type = other DNA
tttttttaagcagtggtatcaacgcagagtacnngttcgaganntggaacganntttttttttttttttttttttttttttttt

SEQ ID NO: 3996 - DNA, 84 bp, synthetic construct
  source 1..84: mol_type = other DNA
tttttttaagcagtggtatcaacgcagagtacnngttcgagannggcaatcanntttttttttttttttttttttttttttttt

SEQ ID NO: 3997 - DNA, 84 bp, synthetic construct
  source 1..84: mol_type = other DNA
tttttttaagcagtggtatcaacgcagagtacnngttcgaganngaatccganntttttttttttttttttttttttttttttt

SEQ ID NO: 3998 - DNA, 84 bp, synthetic construct
  source 1..84: mol_type = other DNA
tttttttaagcagtggtatcaacgcagagtacnngttcgagannttacggtgnntttttttttttttttttttttttttttttt

SEQ ID NO: 3999 - DNA, 84 bp, synthetic construct
  source 1..84: mol_type = other DNA
tttttttaagcagtggtatcaacgcagagtacnngttcgaganncatatcggnntttttttttttttttttttttttttttttt

SEQ ID NO: 4000 - DNA, 84 bp, synthetic construct
  source 1..84: mol_type = other DNA
tttttttaagcagtggtatcaacgcagagtacnngttcgaganncttcggtanntttttttttttttttttttttttttttttt

SEQ ID NO: 4001 - DNA, 84 bp, synthetic construct
  source 1..84: mol_type = other DNA
tttttttaagcagtggtatcaacgcagagtacnngttcgaganntcctaacgnntttttttttttttttttttttttttttttt

SEQ ID NO: 4002 - DNA, 84 bp, synthetic construct
  source 1..84: mol_type = other DNA
tttttttaagcagtggtatcaacgcagagtacnngttcgaganngtaagccanntttttttttttttttttttttttttttttt

SEQ ID NO: 4003 - DNA, 84 bp, synthetic construct
  source 1..84: mol_type = other DNA
tttttttaagcagtggtatcaacgcagagtacnngttcgaganntaaggtggnntttttttttttttttttttttttttttttt

SEQ ID NO: 4004 - DNA, 84 bp, synthetic construct
  source 1..84: mol_type = other DNA
tttttttaagcagtggtatcaacgcagagtacnngttcgagannggtaagctnntttttttttttttttttttttttttttttt

SEQ ID NO: 4005 - DNA, 84 bp, synthetic construct
  source 1..84: mol_type = other DNA
tttttttaagcagtggtatcaacgcagagtacnngttcgaganntgtgtcganntttttttttttttttttttttttttttttt

SEQ ID NO: 4006 - DNA, 84 bp, synthetic construct
  source 1..84: mol_type = other DNA
tttttttaagcagtggtatcaacgcagagtacnngttcgaganngagcatganntttttttttttttttttttttttttttttt

SEQ ID NO: 4007 - DNA, 84 bp, synthetic construct
  source 1..84: mol_type = other DNA
tttttttaagcagtggtatcaacgcagagtacnngttcgaganntcgaagtcnntttttttttttttttttttttttttttttt

SEQ ID NO: 4008 - DNA, 84 bp, synthetic construct
  source 1..84: mol_type = other DNA
tttttttaagcagtggtatcaacgcagagtacnngttcgagannggtgaacanntttttttttttttttttttttttttttttt

SEQ ID NO: 4009 - DNA, 84 bp, synthetic construct
  source 1..84: mol_type = other DNA
tttttttaagcagtggtatcaacgcagagtacnngttcgagannacatgcacnntttttttttttttttttttttttttttttt

SEQ ID NO: 4010 - DNA, 84 bp, synthetic construct
  source 1..84: mol_type = other DNA
tttttttaagcagtggtatcaacgcagagtacnngttcgagannccaacagtnntttttttttttttttttttttttttttttt

SEQ ID NO: 4011 - DNA, 84 bp, synthetic construct
  source 1..84: mol_type = other DNA
tttttttaagcagtggtatcaacgcagagtacnngttcgagannagaacagcnntttttttttttttttttttttttttttttt

SEQ ID NO: 4012 - DNA, 84 bp, synthetic construct
  source 1..84: mol_type = other DNA
tttttttaagcagtggtatcaacgcagagtacnngttcgaganngaacacgtnntttttttttttttttttttttttttttttt

SEQ ID NO: 4013 - DNA, 84 bp, synthetic construct
  source 1..84: mol_type = other DNA
tttttttaagcagtggtatcaacgcagagtacnngttcgagannggtcttcanntttttttttttttttttttttttttttttt

SEQ ID NO: 4014 - DNA, 84 bp, synthetic construct
  source 1..84: mol_type = other DNA
tttttttaagcagtggtatcaacgcagagtacnngttcgagannaggttcagnntttttttttttttttttttttttttttttt

SEQ ID NO: 4015 - DNA, 84 bp, synthetic construct
  source 1..84: mol_type = other DNA
tttttttaagcagtggtatcaacgcagagtacnngttcgagannctagagcanntttttttttttttttttttttttttttttt

SEQ ID NO: 4016 - DNA, 84 bp, synthetic construct
  source 1..84: mol_type = other DNA
tttttttaagcagtggtatcaacgcagagtacnngttcgaganncttctagcnntttttttttttttttttttttttttttttt

SEQ ID NO: 4017 - DNA, 84 bp, synthetic construct
  source 1..84: mol_type = other DNA
tttttttaagcagtggtatcaacgcagagtacnngttcgaganngagtaacgnntttttttttttttttttttttttttttttt

SEQ ID NO: 4018 - DNA, 84 bp, synthetic construct
  source 1..84: mol_type = other DNA
tttttttaagcagtggtatcaacgcagagtacnngttcgagannctaagaggnntttttttttttttttttttttttttttttt

SEQ ID NO: 4019 - DNA, 84 bp, synthetic construct
  source 1..84: mol_type = other DNA
tttttttaagcagtggtatcaacgcagagtacnngttcgagannacgtgtagnntttttttttttttttttttttttttttttt

SEQ ID NO: 4020 - DNA, 84 bp, synthetic construct
  source 1..84: mol_type = other DNA
tttttttaagcagtggtatcaacgcagagtacnngttcgagannactacaggnntttttttttttttttttttttttttttttt

SEQ ID NO: 4021 - DNA, 84 bp, synthetic construct
  source 1..84: mol_type = other DNA
tttttttaagcagtggtatcaacgcagagtacnngttcgaganntacaggtcnntttttttttttttttttttttttttttttt

SEQ ID NO: 4022 - DNA, 84 bp, synthetic construct
  source 1..84: mol_type = other DNA
tttttttaagcagtggtatcaacgcagagtacnngttcgagannctcacatgnntttttttttttttttttttttttttttttt

SEQ ID NO: 4023 - DNA, 84 bp, synthetic construct
  source 1..84: mol_type = other DNA
tttttttaagcagtggtatcaacgcagagtacnngttcgagannactaggagnntttttttttttttttttttttttttttttt

SEQ ID NO: 4024 - DNA, 84 bp, synthetic construct
  source 1..84: mol_type = other DNA
tttttttaagcagtggtatcaacgcagagtacnngttcgagannccatagganntttttttttttttttttttttttttttttt

SEQ ID NO: 4025 - DNA, 84 bp, synthetic construct
  source 1..84: mol_type = other DNA
tttttttaagcagtggtatcaacgcagagtacnngttcgagannggagaatcnntttttttttttttttttttttttttttttt

SEQ ID NO: 4026 - DNA, 84 bp, synthetic construct
  source 1..84: mol_type = other DNA
tttttttaagcagtggtatcaacgcagagtacnngttcgaganngccaagaanntttttttttttttttttttttttttttttt

SEQ ID NO: 4027 - DNA, 84 bp, synthetic construct
  source 1..84: mol_type = other DNA
tttttttaagcagtggtatcaacgcagagtacnngttcgagannaaggcaagnntttttttttttttttttttttttttttttt

SEQ ID NO: 4028 - DNA, 84 bp, synthetic construct
  source 1..84: mol_type = other DNA
tttttttaagcagtggtatcaacgcagagtacnngttcgagannaatgtcgcnntttttttttttttttttttttttttttttt

SEQ ID NO: 4029 - DNA, 84 bp, synthetic construct
  source 1..84: mol_type = other DNA
tttttttaagcagtggtatcaacgcagagtacnngttcgagannatggaaccnntttttttttttttttttttttttttttttt

SEQ ID NO: 4030 - DNA, 84 bp, synthetic construct
  source 1..84: mol_type = other DNA
tttttttaagcagtggtatcaacgcagagtacnngttcgagannagaggcatnntttttttttttttttttttttttttttttt

SEQ ID NO: 4031 - DNA, 84 bp, synthetic construct
  source 1..84: mol_type = other DNA
tttttttaagcagtggtatcaacgcagagtacnngttcgaganntgcatagcnntttttttttttttttttttttttttttttt

SEQ ID NO: 4032 - DNA, 84 bp, synthetic construct
  source 1..84: mol_type = other DNA
tttttttaagcagtggtatcaacgcagagtacnngttcgagannctaacgganntttttttttttttttttttttttttttttt

SEQ ID NO: 4033 - DNA, 84 bp, synthetic construct
  source 1..84: mol_type = other DNA
tttttttaagcagtggtatcaacgcagagtacnngttcgaganntatcgaggnntttttttttttttttttttttttttttttt

SEQ ID NO: 4034 - DNA, 84 bp, synthetic construct
  source 1..84: mol_type = other DNA
tttttttaagcagtggtatcaacgcagagtacnngttcgaganncatagcctnntttttttttttttttttttttttttttttt

SEQ ID NO: 4035 - DNA, 84 bp, synthetic construct
  source 1..84: mol_type = other DNA
tttttttaagcagtggtatcaacgcagagtacnngttcgagannatcgagacnntttttttttttttttttttttttttttttt

SEQ ID NO: 4036 - DNA, 84 bp, synthetic construct
  source 1..84: mol_type = other DNA
tttttttaagcagtggtatcaacgcagagtacnngttcgagannggaagagtnntttttttttttttttttttttttttttttt

SEQ ID NO: 4037 - DNA, 84 bp, synthetic construct
  source 1..84: mol_type = other DNA
tttttttaagcagtggtatcaacgcagagtacnngttcgagannccaagtagnntttttttttttttttttttttttttttttt

SEQ ID NO: 4038 - DNA, 84 bp, synthetic construct
  source 1..84: mol_type = other DNA
tttttttaagcagtggtatcaacgcagagtacnngttcgagannctgaacagnntttttttttttttttttttttttttttttt

SEQ ID NO: 4039 - DNA, 84 bp, synthetic construct
  source 1..84: mol_type = other DNA
tttttttaagcagtggtatcaacgcagagtacnngttcgaganngtaggttcnntttttttttttttttttttttttttttttt

SEQ ID NO: 4040 - DNA, 84 bp, synthetic construct
  source 1..84: mol_type = other DNA
tttttttaagcagtggtatcaacgcagagtacnngttcgaganngtatggacnntttttttttttttttttttttttttttttt

SEQ ID NO: 4041 - DNA, 84 bp, synthetic construct
  source 1..84: mol_type = other DNA
tttttttaagcagtggtatcaacgcagagtacnngttcgaganntcgcaacanntttttttttttttttttttttttttttttt

SEQ ID NO: 4042 - DNA, 84 bp, synthetic construct
  source 1..84: mol_type = other DNA
tttttttaagcagtggtatcaacgcagagtacnngttcgagannccgctaatnntttttttttttttttttttttttttttttt

SEQ ID NO: 4043 - DNA, 84 bp, synthetic construct
  source 1..84: mol_type = other DNA
tttttttaagcagtggtatcaacgcagagtacnngttcgaganngattcgcanntttttttttttttttttttttttttttttt

SEQ ID NO: 4044 - DNA, 84 bp, synthetic construct
  source 1..84: mol_type = other DNA
tttttttaagcagtggtatcaacgcagagtacnngttcgaganncgatggaanntttttttttttttttttttttttttttttt

SEQ ID NO: 4045 - DNA, 84 bp, synthetic construct
  source 1..84: mol_type = other DNA
tttttttaagcagtggtatcaacgcagagtacnngttcgagannagcaagganntttttttttttttttttttttttttttttt

SEQ ID NO: 4046 - DNA, 84 bp, synthetic construct
  source 1..84: mol_type = other DNA
tttttttaagcagtggtatcaacgcagagtacnngttcgaganncgtagcaanntttttttttttttttttttttttttttttt

SEQ ID NO: 4047 - DNA, 84 bp, synthetic construct
  source 1..84: mol_type = other DNA
tttttttaagcagtggtatcaacgcagagtacnngttcgaganntggcagtanntttttttttttttttttttttttttttttt

SEQ ID NO: 4048 - DNA, 84 bp, synthetic construct
  source 1..84: mol_type = other DNA
tttttttaagcagtggtatcaacgcagagtacnngttcgaganncggtagttnntttttttttttttttttttttttttttttt

SEQ ID NO: 4049 - DNA, 84 bp, synthetic construct
  source 1..84: mol_type = other DNA
tttttttaagcagtggtatcaacgcagagtacnngttcgaganntgacttcgnntttttttttttttttttttttttttttttt

SEQ ID NO: 4050 - DNA, 84 bp, synthetic construct
  source 1..84: mol_type = other DNA
tttttttaagcagtggtatcaacgcagagtacnngttcgaganngagtgcaanntttttttttttttttttttttttttttttt

SEQ ID NO: 4051 - DNA, 84 bp, synthetic construct
  source 1..84: mol_type = other DNA
tttttttaagcagtggtatcaacgcagagtacnngttcgagannacggtaacnntttttttttttttttttttttttttttttt

SEQ ID NO: 4052 - DNA, 84 bp, synthetic construct
  source 1..84: mol_type = other DNA
tttttttaagcagtggtatcaacgcagagtacnngttcgagannaagtggtgnntttttttttttttttttttttttttttttt

SEQ ID NO: 4053 - DNA, 84 bp, synthetic construct
  source 1..84: mol_type = other DNA
tttttttaagcagtggtatcaacgcagagtacnngttcgagannggagacaanntttttttttttttttttttttttttttttt

SEQ ID NO: 4054 - DNA, 84 bp, synthetic construct
  source 1..84: mol_type = other DNA
tttttttaagcagtggtatcaacgcagagtacnngttcgaganntcaaggacnntttttttttttttttttttttttttttttt

SEQ ID NO: 4055 - DNA, 84 bp, synthetic construct
  source 1..84: mol_type = other DNA
tttttttaagcagtggtatcaacgcagagtacnngttcgagannaagagagcnntttttttttttttttttttttttttttttt

SEQ ID NO: 4056 - DNA, 84 bp, synthetic construct
  source 1..84: mol_type = other DNA
tttttttaagcagtggtatcaacgcagagtacnngttcgaganncgagagatnntttttttttttttttttttttttttttttt

SEQ ID NO: 4057 - DNA, 84 bp, synthetic construct
  source 1..84: mol_type = other DNA
tttttttaagcagtggtatcaacgcagagtacnngttcgagannacagatggnntttttttttttttttttttttttttttttt

SEQ ID NO: 4058 - DNA, 84 bp, synthetic construct
  source 1..84: mol_type = other DNA
tttttttaagcagtggtatcaacgcagagtacnngttcgagannaggagtcanntttttttttttttttttttttttttttttt

SEQ ID NO: 4059 - DNA, 84 bp, synthetic construct
  source 1..84: mol_type = other DNA
tttttttaagcagtggtatcaacgcagagtacnngttcgaganncgtgttacnntttttttttttttttttttttttttttttt

SEQ ID NO: 4060 - DNA, 84 bp, synthetic construct
  source 1..84: mol_type = other DNA
tttttttaagcagtggtatcaacgcagagtacnngttcgaganntagtgtgcnntttttttttttttttttttttttttttttt

SEQ ID NO: 4061 - DNA, 84 bp, synthetic construct
  source 1..84: mol_type = other DNA
tttttttaagcagtggtatcaacgcagagtacnngttcgagannctcatgacnntttttttttttttttttttttttttttttt

SEQ ID NO: 4062 - DNA, 84 bp, synthetic construct
  source 1..84: mol_type = other DNA
tttttttaagcagtggtatcaacgcagagtacnngttcgaganngtatccagnntttttttttttttttttttttttttttttt

SEQ ID NO: 4063 - DNA, 84 bp, synthetic construct
  source 1..84: mol_type = other DNA
tttttttaagcagtggtatcaacgcagagtacnngttcgagannacgcctatnntttttttttttttttttttttttttttttt

SEQ ID NO: 4064 - DNA, 84 bp, synthetic construct
  source 1..84: mol_type = other DNA
tttttttaagcagtggtatcaacgcagagtacnngttcgagannaacgacctnntttttttttttttttttttttttttttttt

SEQ ID NO: 4065 - DNA, 84 bp, synthetic construct
  source 1..84: mol_type = other DNA
tttttttaagcagtggtatcaacgcagagtacnngttcgagannatcaggctnntttttttttttttttttttttttttttttt

SEQ ID NO: 4066 - DNA, 84 bp, synthetic construct
  source 1..84: mol_type = other DNA
tttttttaagcagtggtatcaacgcagagtacnngttcgaganncaagttcgnntttttttttttttttttttttttttttttt

SEQ ID NO: 4067 - DNA, 84 bp, synthetic construct
  source 1..84: mol_type = other DNA
tttttttaagcagtggtatcaacgcagagtacnngttcgaganntagccaganntttttttttttttttttttttttttttttt

SEQ ID NO: 4068 - DNA, 84 bp, synthetic construct
  source 1..84: mol_type = other DNA
tttttttaagcagtggtatcaacgcagagtacnngttcgaganncaatcacgnntttttttttttttttttttttttttttttt

SEQ ID NO: 4069 - DNA, 84 bp, synthetic construct
  source 1..84: mol_type = other DNA
tttttttaagcagtggtatcaacgcagagtacnngttcgaganngcaacaagnntttttttttttttttttttttttttttttt

SEQ ID NO: 4070 - DNA, 84 bp, synthetic construct
  source 1..84: mol_type = other DNA
tttttttaagcagtggtatcaacgcagagtacnngttcgaganncacgacaanntttttttttttttttttttttttttttttt

SEQ ID NO: 4071 - DNA, 84 bp, synthetic construct
  source 1..84: mol_type = other DNA
tttttttaagcagtggtatcaacgcagagtacnngttcgaganntacggaganntttttttttttttttttttttttttttttt

SEQ ID NO: 4072 - DNA, 84 bp, synthetic construct
  source 1..84: mol_type = other DNA
tttttttaagcagtggtatcaacgcagagtacnngttcgaganncgacaaganntttttttttttttttttttttttttttttt

SEQ ID NO: 4073 - DNA, 84 bp, synthetic construct
  source 1..84: mol_type = other DNA
tttttttaagcagtggtatcaacgcagagtacnngttcgaganncgaagtganntttttttttttttttttttttttttttttt

SEQ ID NO: 4074 - DNA, 84 bp, synthetic construct
  source 1..84: mol_type = other DNA
tttttttaagcagtggtatcaacgcagagtacnngttcgagannagctggtanntttttttttttttttttttttttttttttt

SEQ ID NO: 4075 - DNA, 84 bp, synthetic construct
  source 1..84: mol_type = other DNA
tttttttaagcagtggtatcaacgcagagtacnngttcgagannaactaggcnntttttttttttttttttttttttttttttt

SEQ ID NO: 4076 - DNA, 84 bp, synthetic construct
  source 1..84: mol_type = other DNA
tttttttaagcagtggtatcaacgcagagtacnngttcgaganncagcaagtnntttttttttttttttttttttttttttttt

SEQ ID NO: 4077 - DNA, 84 bp, synthetic construct
  source 1..84: mol_type = other DNA
tttttttaagcagtggtatcaacgcagagtacnngttcgagannacgaggtanntttttttttttttttttttttttttttttt

SEQ ID NO: 4078 - DNA, 84 bp, synthetic construct
  source 1..84: mol_type = other DNA
tttttttaagcagtggtatcaacgcagagtacnngttcgaganncatcttccnntttttttttttttttttttttttttttttt

SEQ ID NO: 4079 - DNA, 84 bp, synthetic construct
  source 1..84: mol_type = other DNA
tttttttaagcagtggtatcaacgcagagtacnngttcgaganncctgaatcnntttttttttttttttttttttttttttttt

SEQ ID NO: 4080 - DNA, 84 bp, synthetic construct
  source 1..84: mol_type = other DNA
tttttttaagcagtggtatcaacgcagagtacnngttcgaganntgcagactnntttttttttttttttttttttttttttttt

SEQ ID NO: 4081 - DNA, 84 bp, synthetic construct
  source 1..84: mol_type = other DNA
tttttttaagcagtggtatcaacgcagagtacnngttcgagannagatgtggnntttttttttttttttttttttttttttttt

SEQ ID NO: 4082 - DNA, 84 bp, synthetic construct
  source 1..84: mol_type = other DNA
tttttttaagcagtggtatcaacgcagagtacnngttcgagannagttcgacnntttttttttttttttttttttttttttttt

SEQ ID NO: 4083 - DNA, 84 bp, synthetic construct
  source 1..84: mol_type = other DNA
tttttttaagcagtggtatcaacgcagagtacnngttcgagannacaacctcnntttttttttttttttttttttttttttttt

SEQ ID NO: 4084 - DNA, 84 bp, synthetic construct
  source 1..84: mol_type = other DNA
tttttttaagcagtggtatcaacgcagagtacnngttcgaganncatggtagnntttttttttttttttttttttttttttttt

SEQ ID NO: 4085 - DNA, 84 bp, synthetic construct
  source 1..84: mol_type = other DNA
tttttttaagcagtggtatcaacgcagagtacnngttcgaganncgtatctcnntttttttttttttttttttttttttttttt

SEQ ID NO: 4086 - DNA, 84 bp, synthetic construct
  source 1..84: mol_type = other DNA
tttttttaagcagtggtatcaacgcagagtacnngttcgaganncctagttcnntttttttttttttttttttttttttttttt

SEQ ID NO: 4087 - DNA, 84 bp, synthetic construct
  source 1..84: mol_type = other DNA
tttttttaagcagtggtatcaacgcagagtacnngttcgaganncaagagtcnntttttttttttttttttttttttttttttt

SEQ ID NO: 4088 - DNA, 84 bp, synthetic construct
  source 1..84: mol_type = other DNA
tttttttaagcagtggtatcaacgcagagtacnntcctaggtnnaatcggcanntttttttttttttttttttttttttttttt

SEQ ID NO: 4089 - DNA, 84 bp, synthetic construct
  source 1..84: mol_type = other DNA
tttttttaagcagtggtatcaacgcagagtacnntcctaggtnntacggcatnntttttttttttttttttttttttttttttt

SEQ ID NO: 4090 - DNA, 84 bp, synthetic construct
  source 1..84: mol_type = other DNA
tttttttaagcagtggtatcaacgcagagtacnntcctaggtnnttggatcgnntttttttttttttttttttttttttttttt

SEQ ID NO: 4091 - DNA, 84 bp, synthetic construct
  source 1..84: mol_type = other DNA
tttttttaagcagtggtatcaacgcagagtacnntcctaggtnntggaacganntttttttttttttttttttttttttttttt

SEQ ID NO: 4092 - DNA, 84 bp, synthetic construct
  source 1..84: mol_type = other DNA
tttttttaagcagtggtatcaacgcagagtacnntcctaggtnnggcaatcanntttttttttttttttttttttttttttttt

SEQ ID NO: 4093 - DNA, 84 bp, synthetic construct
  source 1..84: mol_type = other DNA
tttttttaagcagtggtatcaacgcagagtacnntcctaggtnngaatccganntttttttttttttttttttttttttttttt

SEQ ID NO: 4094 - DNA, 84 bp, synthetic construct
  source 1..84: mol_type = other DNA
tttttttaagcagtggtatcaacgcagagtacnntcctaggtnnttacggtgnntttttttttttttttttttttttttttttt

SEQ ID NO: 4095 - DNA, 84 bp, synthetic construct
  source 1..84: mol_type = other DNA
tttttttaagcagtggtatcaacgcagagtacnntcctaggtnncatatcggnntttttttttttttttttttttttttttttt

SEQ ID NO: 4096 - DNA, 84 bp, synthetic construct
  source 1..84: mol_type = other DNA
tttttttaagcagtggtatcaacgcagagtacnntcctaggtnncttcggtanntttttttttttttttttttttttttttttt

SEQ ID NO: 4097 - DNA, 84 bp, synthetic construct
  source 1..84: mol_type = other DNA
tttttttaagcagtggtatcaacgcagagtacnntcctaggtnntcctaacgnntttttttttttttttttttttttttttttt

SEQ ID NO: 4098 - DNA, 84 bp, synthetic construct
  source 1..84: mol_type = other DNA
tttttttaagcagtggtatcaacgcagagtacnntcctaggtnngtaagccanntttttttttttttttttttttttttttttt

SEQ ID NO: 4099 - DNA, 84 bp, synthetic construct
  source 1..84: mol_type = other DNA
tttttttaagcagtggtatcaacgcagagtacnntcctaggtnntaaggtggnntttttttttttttttttttttttttttttt

SEQ ID NO: 4100 - DNA, 84 bp, synthetic construct
  source 1..84: mol_type = other DNA
tttttttaagcagtggtatcaacgcagagtacnntcctaggtnnggtaagctnntttttttttttttttttttttttttttttt

SEQ ID NO: 4101 - DNA, 84 bp, synthetic construct
  source 1..84: mol_type = other DNA
tttttttaagcagtggtatcaacgcagagtacnntcctaggtnntgtgtcganntttttttttttttttttttttttttttttt

SEQ ID NO: 4102 - DNA, 84 bp, synthetic construct
  source 1..84: mol_type = other DNA
tttttttaagcagtggtatcaacgcagagtacnntcctaggtnngagcatganntttttttttttttttttttttttttttttt

SEQ ID NO: 4103 - DNA, 84 bp, synthetic construct
  source 1..84: mol_type = other DNA
tttttttaagcagtggtatcaacgcagagtacnntcctaggtnntcgaagtcnntttttttttttttttttttttttttttttt

SEQ ID NO: 4104 - DNA, 84 bp, synthetic construct
  source 1..84: mol_type = other DNA
tttttttaagcagtggtatcaacgcagagtacnntcctaggtnnggtgaacanntttttttttttttttttttttttttttttt

SEQ ID NO: 4105 - DNA, 84 bp, synthetic construct
  source 1..84: mol_type = other DNA
tttttttaagcagtggtatcaacgcagagtacnntcctaggtnnacatgcacnntttttttttttttttttttttttttttttt

SEQ ID NO: 4106 - DNA, 84 bp, synthetic construct
  source 1..84: mol_type = other DNA
tttttttaagcagtggtatcaacgcagagtacnntcctaggtnnccaacagtnntttttttttttttttttttttttttttttt

SEQ ID NO: 4107 - DNA, 84 bp, synthetic construct
  source 1..84: mol_type = other DNA
tttttttaagcagtggtatcaacgcagagtacnntcctaggtnnagaacagcnntttttttttttttttttttttttttttttt

SEQ ID NO: 4108 - DNA, 84 bp, synthetic construct
  source 1..84: mol_type = other DNA
tttttttaagcagtggtatcaacgcagagtacnntcctaggtnngaacacgtnntttttttttttttttttttttttttttttt

SEQ ID NO: 4109 - DNA, 84 bp, synthetic construct
  source 1..84: mol_type = other DNA
tttttttaagcagtggtatcaacgcagagtacnntcctaggtnnggtcttcanntttttttttttttttttttttttttttttt

SEQ ID NO: 4110 - DNA, 84 bp, synthetic construct
  source 1..84: mol_type = other DNA
tttttttaagcagtggtatcaacgcagagtacnntcctaggtnnaggttcagnntttttttttttttttttttttttttttttt

SEQ ID NO: 4111 - DNA, 84 bp, synthetic construct
  source 1..84: mol_type = other DNA
tttttttaagcagtggtatcaacgcagagtacnntcctaggtnnctagagcanntttttttttttttttttttttttttttttt

SEQ ID NO: 4112 - DNA, 84 bp, synthetic construct
  source 1..84: mol_type = other DNA
tttttttaagcagtggtatcaacgcagagtacnntcctaggtnncttctagcnntttttttttttttttttttttttttttttt

SEQ ID NO: 4113 - DNA, 84 bp, synthetic construct
  source 1..84: mol_type = other DNA
tttttttaagcagtggtatcaacgcagagtacnntcctaggtnngagtaacgnntttttttttttttttttttttttttttttt

SEQ ID NO: 4114 - DNA, 84 bp, synthetic construct
  source 1..84: mol_type = other DNA
tttttttaagcagtggtatcaacgcagagtacnntcctaggtnnctaagaggnntttttttttttttttttttttttttttttt

SEQ ID NO: 4115 - DNA, 84 bp, synthetic construct
  source 1..84: mol_type = other DNA
tttttttaagcagtggtatcaacgcagagtacnntcctaggtnnacgtgtagnntttttttttttttttttttttttttttttt

SEQ ID NO: 4116 - DNA, 84 bp, synthetic construct
  source 1..84: mol_type = other DNA
tttttttaagcagtggtatcaacgcagagtacnntcctaggtnnactacaggnntttttttttttttttttttttttttttttt

SEQ ID NO: 4117 - DNA, 84 bp, synthetic construct
  source 1..84: mol_type = other DNA
tttttttaagcagtggtatcaacgcagagtacnntcctaggtnntacaggtcnntttttttttttttttttttttttttttttt

SEQ ID NO: 4118 - DNA, 84 bp, synthetic construct
  source 1..84: mol_type = other DNA
tttttttaagcagtggtatcaacgcagagtacnntcctaggtnnctcacatgnntttttttttttttttttttttttttttttt

SEQ ID NO: 4119 - DNA, 84 bp, synthetic construct
  source 1..84: mol_type = other DNA
tttttttaagcagtggtatcaacgcagagtacnntcctaggtnnactaggagnntttttttttttttttttttttttttttttt

SEQ ID NO: 4120 - DNA, 84 bp, synthetic construct
  source 1..84: mol_type = other DNA
tttttttaagcagtggtatcaacgcagagtacnntcctaggtnnccatagganntttttttttttttttttttttttttttttt

SEQ ID NO: 4121 - DNA, 84 bp, synthetic construct
  source 1..84: mol_type = other DNA
tttttttaagcagtggtatcaacgcagagtacnntcctaggtnnggagaatcnntttttttttttttttttttttttttttttt

SEQ ID NO: 4122 - DNA, 84 bp, synthetic construct
  source 1..84: mol_type = other DNA
tttttttaagcagtggtatcaacgcagagtacnntcctaggtnngccaagaanntttttttttttttttttttttttttttttt

SEQ ID NO: 4123 - DNA, 84 bp, synthetic construct
  source 1..84: mol_type = other DNA
tttttttaagcagtggtatcaacgcagagtacnntcctaggtnnaaggcaagnntttttttttttttttttttttttttttttt

SEQ ID NO: 4124 - DNA, 84 bp, synthetic construct
  source 1..84: mol_type = other DNA
tttttttaagcagtggtatcaacgcagagtacnntcctaggtnnaatgtcgcnntttttttttttttttttttttttttttttt

SEQ ID NO: 4125 - DNA, 84 bp, synthetic construct
  source 1..84: mol_type = other DNA
tttttttaagcagtggtatcaacgcagagtacnntcctaggtnnatggaaccnntttttttttttttttttttttttttttttt

SEQ ID NO: 4126 - DNA, 84 bp, synthetic construct
  source 1..84: mol_type = other DNA
tttttttaagcagtggtatcaacgcagagtacnntcctaggtnnagaggcatnntttttttttttttttttttttttttttttt

SEQ ID NO: 4127 - DNA, 84 bp, synthetic construct
  source 1..84: mol_type = other DNA
tttttttaagcagtggtatcaacgcagagtacnntcctaggtnntgcatagcnntttttttttttttttttttttttttttttt

SEQ ID NO: 4128 - DNA, 84 bp, synthetic construct
  source 1..84: mol_type = other DNA
tttttttaagcagtggtatcaacgcagagtacnntcctaggtnnctaacgganntttttttttttttttttttttttttttttt

SEQ ID NO: 4129 - DNA, 84 bp, synthetic construct
  source 1..84: mol_type = other DNA
tttttttaagcagtggtatcaacgcagagtacnntcctaggtnntatcgaggnntttttttttttttttttttttttttttttt

SEQ ID NO: 4130 - DNA, 84 bp, synthetic construct
  source 1..84: mol_type = other DNA
tttttttaagcagtggtatcaacgcagagtacnntcctaggtnncatagcctnntttttttttttttttttttttttttttttt

SEQ ID NO: 4131 - DNA, 84 bp, synthetic construct
  source 1..84: mol_type = other DNA
tttttttaagcagtggtatcaacgcagagtacnntcctaggtnnatcgagacnntttttttttttttttttttttttttttttt

SEQ ID NO: 4132 - DNA, 84 bp, synthetic construct
  source 1..84: mol_type = other DNA
tttttttaagcagtggtatcaacgcagagtacnntcctaggtnnggaagagtnntttttttttttttttttttttttttttttt

SEQ ID NO: 4133 - DNA, 84 bp, synthetic construct
  source 1..84: mol_type = other DNA
tttttttaagcagtggtatcaacgcagagtacnntcctaggtnnccaagtagnntttttttttttttttttttttttttttttt

SEQ ID NO: 4134 - DNA, 84 bp, synthetic construct
  source 1..84: mol_type = other DNA
tttttttaagcagtggtatcaacgcagagtacnntcctaggtnnctgaacagnntttttttttttttttttttttttttttttt

SEQ ID NO: 4135 - DNA, 84 bp, synthetic construct
  source 1..84: mol_type = other DNA
tttttttaagcagtggtatcaacgcagagtacnntcctaggtnngtaggttcnntttttttttttttttttttttttttttttt

SEQ ID NO: 4136 - DNA, 84 bp, synthetic construct
  source 1..84: mol_type = other DNA
tttttttaagcagtggtatcaacgcagagtacnntcctaggtnngtatggacnntttttttttttttttttttttttttttttt

SEQ ID NO: 4137 - DNA, 84 bp, synthetic construct
  source 1..84: mol_type = other DNA
tttttttaagcagtggtatcaacgcagagtacnntcctaggtnntcgcaacanntttttttttttttttttttttttttttttt

SEQ ID NO: 4138 - DNA, 84 bp, synthetic construct
  source 1..84: mol_type = other DNA
tttttttaagcagtggtatcaacgcagagtacnntcctaggtnnccgctaatnntttttttttttttttttttttttttttttt

SEQ ID NO: 4139 - DNA, 84 bp, synthetic construct
  source 1..84: mol_type = other DNA
tttttttaagcagtggtatcaacgcagagtacnntcctaggtnngattcgcanntttttttttttttttttttttttttttttt

SEQ ID NO: 4140 - DNA, 84 bp, synthetic construct
  source 1..84: mol_type = other DNA
tttttttaagcagtggtatcaacgcagagtacnntcctaggtnncgatggaanntttttttttttttttttttttttttttttt

SEQ ID NO: 4141 - DNA, 84 bp, synthetic construct
  source 1..84: mol_type = other DNA
tttttttaagcagtggtatcaacgcagagtacnntcctaggtnnagcaagganntttttttttttttttttttttttttttttt

SEQ ID NO: 4142 - DNA, 84 bp, synthetic construct
  source 1..84: mol_type = other DNA
tttttttaagcagtggtatcaacgcagagtacnntcctaggtnncgtagcaanntttttttttttttttttttttttttttttt

SEQ ID NO: 4143 - DNA, 84 bp, synthetic construct
  source 1..84: mol_type = other DNA
tttttttaagcagtggtatcaacgcagagtacnntcctaggtnntggcagtanntttttttttttttttttttttttttttttt

SEQ ID NO: 4144 - DNA, 84 bp, synthetic construct
  source 1..84: mol_type = other DNA
tttttttaagcagtggtatcaacgcagagtacnntcctaggtnncggtagttnntttttttttttttttttttttttttttttt

SEQ ID NO: 4145 - DNA, 84 bp, synthetic construct
  source 1..84: mol_type = other DNA
tttttttaagcagtggtatcaacgcagagtacnntcctaggtnntgacttcgnntttttttttttttttttttttttttttttt

SEQ ID NO: 4146 - DNA, 84 bp, synthetic construct
  source 1..84: mol_type = other DNA
tttttttaagcagtggtatcaacgcagagtacnntcctaggtnngagtgcaanntttttttttttttttttttttttttttttt

SEQ ID NO: 4147 - DNA, 84 bp, synthetic construct
  source 1..84: mol_type = other DNA
tttttttaagcagtggtatcaacgcagagtacnntcctaggtnnacggtaacnntttttttttttttttttttttttttttttt

SEQ ID NO: 4148 - DNA, 84 bp, synthetic construct
  source 1..84: mol_type = other DNA
tttttttaagcagtggtatcaacgcagagtacnntcctaggtnnaagtggtgnntttttttttttttttttttttttttttttt

SEQ ID NO: 4149 - DNA, 84 bp, synthetic construct
  source 1..84: mol_type = other DNA
tttttttaagcagtggtatcaacgcagagtacnntcctaggtnnggagacaanntttttttttttttttttttttttttttttt

SEQ ID NO: 4150 - DNA, 84 bp, synthetic construct
  source 1..84: mol_type = other DNA
tttttttaagcagtggtatcaacgcagagtacnntcctaggtnntcaaggacnntttttttttttttttttttttttttttttt

SEQ ID NO: 4151 - DNA, 84 bp, synthetic construct
  source 1..84: mol_type = other DNA
tttttttaagcagtggtatcaacgcagagtacnntcctaggtnnaagagagcnntttttttttttttttttttttttttttttt

SEQ ID NO: 4152 - DNA, 84 bp, synthetic construct
  source 1..84: mol_type = other DNA
tttttttaagcagtggtatcaacgcagagtacnntcctaggtnncgagagatnntttttttttttttttttttttttttttttt

SEQ ID NO: 4153 - DNA, 84 bp, synthetic construct
  source 1..84: mol_type = other DNA
tttttttaagcagtggtatcaacgcagagtacnntcctaggtnnacagatggnntttttttttttttttttttttttttttttt

SEQ ID NO: 4154 - DNA, 84 bp, synthetic construct
  source 1..84: mol_type = other DNA
tttttttaagcagtggtatcaacgcagagtacnntcctaggtnnaggagtcanntttttttttttttttttttttttttttttt

SEQ ID NO: 4155 - DNA, 84 bp, synthetic construct
  source 1..84: mol_type = other DNA
tttttttaagcagtggtatcaacgcagagtacnntcctaggtnncgtgttacnntttttttttttttttttttttttttttttt

SEQ ID NO: 4156 - DNA, 84 bp, synthetic construct
  source 1..84: mol_type = other DNA
tttttttaagcagtggtatcaacgcagagtacnntcctaggtnntagtgtgcnntttttttttttttttttttttttttttttt

SEQ ID NO: 4157 - DNA, 84 bp, synthetic construct
  source 1..84: mol_type = other DNA
tttttttaagcagtggtatcaacgcagagtacnntcctaggtnnctcatgacnntttttttttttttttttttttttttttttt

SEQ ID NO: 4158 - DNA, 84 bp, synthetic construct
  source 1..84: mol_type = other DNA
tttttttaagcagtggtatcaacgcagagtacnntcctaggtnngtatccagnntttttttttttttttttttttttttttttt

SEQ ID NO: 4159 - DNA, 84 bp, synthetic construct
  source 1..84: mol_type = other DNA
tttttttaagcagtggtatcaacgcagagtacnntcctaggtnnacgcctatnntttttttttttttttttttttttttttttt

SEQ ID NO: 4160 - DNA, 84 bp, synthetic construct
  source 1..84: mol_type = other DNA
tttttttaagcagtggtatcaacgcagagtacnntcctaggtnnaacgacctnntttttttttttttttttttttttttttttt

SEQ ID NO: 4161 - DNA, 84 bp, synthetic construct
  source 1..84: mol_type = other DNA
tttttttaagcagtggtatcaacgcagagtacnntcctaggtnnatcaggctnntttttttttttttttttttttttttttttt

SEQ ID NO: 4162 - DNA, 84 bp, synthetic construct
  source 1..84: mol_type = other DNA
tttttttaagcagtggtatcaacgcagagtacnntcctaggtnncaagttcgnntttttttttttttttttttttttttttttt

SEQ ID NO: 4163 - DNA, 84 bp, synthetic construct
  source 1..84: mol_type = other DNA
tttttttaagcagtggtatcaacgcagagtacnntcctaggtnntagccaganntttttttttttttttttttttttttttttt

SEQ ID NO: 4164 - DNA, 84 bp, synthetic construct
  source 1..84: mol_type = other DNA
tttttttaagcagtggtatcaacgcagagtacnntcctaggtnncaatcacgnntttttttttttttttttttttttttttttt

SEQ ID NO: 4165 - DNA, 84 bp, synthetic construct
  source 1..84: mol_type = other DNA
tttttttaagcagtggtatcaacgcagagtacnntcctaggtnngcaacaagnntttttttttttttttttttttttttttttt

SEQ ID NO: 4166 - DNA, 84 bp, synthetic construct
  source 1..84: mol_type = other DNA
tttttttaagcagtggtatcaacgcagagtacnntcctaggtnncacgacaanntttttttttttttttttttttttttttttt

SEQ ID NO: 4167 - DNA, 84 bp, synthetic construct
  source 1..84: mol_type = other DNA
tttttttaagcagtggtatcaacgcagagtacnntcctaggtnntacggaganntttttttttttttttttttttttttttttt

SEQ ID NO: 4168 - DNA, 84 bp, synthetic construct
  source 1..84: mol_type = other DNA
tttttttaagcagtggtatcaacgcagagtacnntcctaggtnncgacaaganntttttttttttttttttttttttttttttt

SEQ ID NO: 4169 - DNA, 84 bp, synthetic construct
  source 1..84: mol_type = other DNA
tttttttaagcagtggtatcaacgcagagtacnntcctaggtnncgaagtganntttttttttttttttttttttttttttttt

SEQ ID NO: 4170 - DNA, 84 bp, synthetic construct
  source 1..84: mol_type = other DNA
tttttttaagcagtggtatcaacgcagagtacnntcctaggtnnagctggtanntttttttttttttttttttttttttttttt

SEQ ID NO: 4171 - DNA, 84 bp, synthetic construct
  source 1..84: mol_type = other DNA
tttttttaagcagtggtatcaacgcagagtacnntcctaggtnnaactaggcnntttttttttttttttttttttttttttttt

SEQ ID NO: 4172 - DNA, 84 bp, synthetic construct
  source 1..84: mol_type = other DNA
tttttttaagcagtggtatcaacgcagagtacnntcctaggtnncagcaagtnntttttttttttttttttttttttttttttt

SEQ ID NO: 4173 - DNA, 84 bp, synthetic construct
  source 1..84: mol_type = other DNA
tttttttaagcagtggtatcaacgcagagtacnntcctaggtnnacgaggtanntttttttttttttttttttttttttttttt

SEQ ID NO: 4174 - DNA, 84 bp, synthetic construct
  source 1..84: mol_type = other DNA
tttttttaagcagtggtatcaacgcagagtacnntcctaggtnncatcttccnntttttttttttttttttttttttttttttt

SEQ ID NO: 4175 - DNA, 84 bp, synthetic construct
  source 1..84: mol_type = other DNA
tttttttaagcagtggtatcaacgcagagtacnntcctaggtnncctgaatcnntttttttttttttttttttttttttttttt

SEQ ID NO: 4176 - DNA, 84 bp, synthetic construct
  source 1..84: mol_type = other DNA
tttttttaagcagtggtatcaacgcagagtacnntcctaggtnntgcagactnntttttttttttttttttttttttttttttt

SEQ ID NO: 4177 - DNA, 84 bp, synthetic construct
  source 1..84: mol_type = other DNA
tttttttaagcagtggtatcaacgcagagtacnntcctaggtnnagatgtggnntttttttttttttttttttttttttttttt

SEQ ID NO: 4178 - DNA, 84 bp, synthetic construct
  source 1..84: mol_type = other DNA
tttttttaagcagtggtatcaacgcagagtacnntcctaggtnnagttcgacnntttttttttttttttttttttttttttttt

SEQ ID NO: 4179 - DNA, 84 bp, synthetic construct
  source 1..84: mol_type = other DNA
tttttttaagcagtggtatcaacgcagagtacnntcctaggtnnacaacctcnntttttttttttttttttttttttttttttt

SEQ ID NO: 4180 - DNA, 84 bp, synthetic construct
  source 1..84: mol_type = other DNA
tttttttaagcagtggtatcaacgcagagtacnntcctaggtnncatggtagnntttttttttttttttttttttttttttttt

SEQ ID NO: 4181 - DNA, 84 bp, synthetic construct
  source 1..84: mol_type = other DNA
tttttttaagcagtggtatcaacgcagagtacnntcctaggtnncgtatctcnntttttttttttttttttttttttttttttt

SEQ ID NO: 4182 - DNA, 84 bp, synthetic construct
  source 1..84: mol_type = other DNA
tttttttaagcagtggtatcaacgcagagtacnntcctaggtnncctagttcnntttttttttttttttttttttttttttttt

SEQ ID NO: 4183 - DNA, 84 bp, synthetic construct
  source 1..84: mol_type = other DNA
tttttttaagcagtggtatcaacgcagagtacnntcctaggtnncaagagtcnntttttttttttttttttttttttttttttt

SEQ ID NO: 4184 - DNA, 84 bp, synthetic construct
  source 1..84: mol_type = other DNA
tttttttaagcagtggtatcaacgcagagtacnngatgacgannaatcggcanntttttttttttttttttttttttttttttt

SEQ ID NO: 4185 - DNA, 84 bp, synthetic construct
  source 1..84: mol_type = other DNA
tttttttaagcagtggtatcaacgcagagtacnngatgacganntacggcatnntttttttttttttttttttttttttttttt

SEQ ID NO: 4186 - DNA, 84 bp, synthetic construct
  source 1..84: mol_type = other DNA
tttttttaagcagtggtatcaacgcagagtacnngatgacgannttggatcgnntttttttttttttttttttttttttttttt

SEQ ID NO: 4187 - DNA, 84 bp, synthetic construct
  source 1..84: mol_type = other DNA
tttttttaagcagtggtatcaacgcagagtacnngatgacganntggaacganntttttttttttttttttttttttttttttt

SEQ ID NO: 4188 - DNA, 84 bp, synthetic construct
  source 1..84: mol_type = other DNA
tttttttaagcagtggtatcaacgcagagtacnngatgacgannggcaatcanntttttttttttttttttttttttttttttt

SEQ ID NO: 4189 - DNA, 84 bp, synthetic construct
  source 1..84: mol_type = other DNA
tttttttaagcagtggtatcaacgcagagtacnngatgacganngaatccganntttttttttttttttttttttttttttttt

SEQ ID NO: 4190 - DNA, 84 bp, synthetic construct
  source 1..84: mol_type = other DNA
tttttttaagcagtggtatcaacgcagagtacnngatgacgannttacggtgnntttttttttttttttttttttttttttttt

SEQ ID NO: 4191 - DNA, 84 bp, synthetic construct
  source 1..84: mol_type = other DNA
tttttttaagcagtggtatcaacgcagagtacnngatgacganncatatcggnntttttttttttttttttttttttttttttt

SEQ ID NO: 4192 - DNA, 84 bp, synthetic construct
  source 1..84: mol_type = other DNA
tttttttaagcagtggtatcaacgcagagtacnngatgacganncttcggtanntttttttttttttttttttttttttttttt

SEQ ID NO: 4193 - DNA, 84 bp, synthetic construct
  source 1..84: mol_type = other DNA
tttttttaagcagtggtatcaacgcagagtacnngatgacganntcctaacgnntttttttttttttttttttttttttttttt

SEQ ID NO: 4194 - DNA, 84 bp, synthetic construct
  source 1..84: mol_type = other DNA
tttttttaagcagtggtatcaacgcagagtacnngatgacganngtaagccanntttttttttttttttttttttttttttttt

SEQ ID NO: 4195 - DNA, 84 bp, synthetic construct
  source 1..84: mol_type = other DNA
tttttttaagcagtggtatcaacgcagagtacnngatgacganntaaggtggnntttttttttttttttttttttttttttttt

SEQ ID NO: 4196 - DNA, 84 bp, synthetic construct
  source 1..84: mol_type = other DNA
tttttttaagcagtggtatcaacgcagagtacnngatgacgannggtaagctnntttttttttttttttttttttttttttttt

SEQ ID NO: 4197 - DNA, 84 bp, synthetic construct
  source 1..84: mol_type = other DNA
tttttttaagcagtggtatcaacgcagagtacnngatgacganntgtgtcganntttttttttttttttttttttttttttttt

SEQ ID NO: 4198 - DNA, 84 bp, synthetic construct
  source 1..84: mol_type = other DNA
tttttttaagcagtggtatcaacgcagagtacnngatgacganngagcatganntttttttttttttttttttttttttttttt

SEQ ID NO: 4199 - DNA, 84 bp, synthetic construct
  source 1..84: mol_type = other DNA
tttttttaagcagtggtatcaacgcagagtacnngatgacganntcgaagtcnntttttttttttttttttttttttttttttt

SEQ ID NO: 4200 - DNA, 84 bp, synthetic construct
  source 1..84: mol_type = other DNA
tttttttaagcagtggtatcaacgcagagtacnngatgacgannggtgaacanntttttttttttttttttttttttttttttt

SEQ ID NO: 4201 - DNA, 84 bp, synthetic construct
  source 1..84: mol_type = other DNA
tttttttaagcagtggtatcaacgcagagtacnngatgacgannacatgcacnntttttttttttttttttttttttttttttt

SEQ ID NO: 4202 - DNA, 84 bp, synthetic construct
  source 1..84: mol_type = other DNA
tttttttaagcagtggtatcaacgcagagtacnngatgacgannccaacagtnntttttttttttttttttttttttttttttt

SEQ ID NO: 4203 - DNA, 84 bp, synthetic construct
  source 1..84: mol_type = other DNA
tttttttaagcagtggtatcaacgcagagtacnngatgacgannagaacagcnntttttttttttttttttttttttttttttt

SEQ ID NO: 4204 - DNA, 84 bp, synthetic construct
  source 1..84: mol_type = other DNA
tttttttaagcagtggtatcaacgcagagtacnngatgacganngaacacgtnntttttttttttttttttttttttttttttt

SEQ ID NO: 4205 - DNA, 84 bp, synthetic construct
  source 1..84: mol_type = other DNA
tttttttaagcagtggtatcaacgcagagtacnngatgacgannggtcttcanntttttttttttttttttttttttttttttt

SEQ ID NO: 4206 - DNA, 84 bp, synthetic construct
  source 1..84: mol_type = other DNA
tttttttaagcagtggtatcaacgcagagtacnngatgacgannaggttcagnntttttttttttttttttttttttttttttt

SEQ ID NO: 4207 - DNA, 84 bp, synthetic construct
  source 1..84: mol_type = other DNA
tttttttaagcagtggtatcaacgcagagtacnngatgacgannctagagcanntttttttttttttttttttttttttttttt

SEQ ID NO: 4208 - DNA, 84 bp, synthetic construct
  source 1..84: mol_type = other DNA
tttttttaagcagtggtatcaacgcagagtacnngatgacganncttctagcnntttttttttttttttttttttttttttttt

SEQ ID NO: 4209 - DNA, 84 bp, synthetic construct
  source 1..84: mol_type = other DNA
tttttttaagcagtggtatcaacgcagagtacnngatgacganngagtaacgnntttttttttttttttttttttttttttttt

SEQ ID NO: 4210 - DNA, 84 bp, synthetic construct
  source 1..84: mol_type = other DNA
tttttttaagcagtggtatcaacgcagagtacnngatgacgannctaagaggnntttttttttttttttttttttttttttttt

SEQ ID NO: 4211 - DNA, 84 bp, synthetic construct
  source 1..84: mol_type = other DNA
tttttttaagcagtggtatcaacgcagagtacnngatgacgannacgtgtagnntttttttttttttttttttttttttttttt

SEQ ID NO: 4212 - DNA, 84 bp, synthetic construct
  source 1..84: mol_type = other DNA
tttttttaagcagtggtatcaacgcagagtacnngatgacgannactacaggnntttttttttttttttttttttttttttttt

SEQ ID NO: 4213 - DNA, 84 bp, synthetic construct
  source 1..84: mol_type = other DNA
tttttttaagcagtggtatcaacgcagagtacnngatgacganntacaggtcnntttttttttttttttttttttttttttttt

SEQ ID NO: 4214 - DNA, 84 bp, synthetic construct
  source 1..84: mol_type = other DNA
tttttttaagcagtggtatcaacgcagagtacnngatgacgannctcacatgnntttttttttttttttttttttttttttttt

SEQ ID NO: 4215 - DNA, 84 bp, synthetic construct
  source 1..84: mol_type = other DNA
tttttttaagcagtggtatcaacgcagagtacnngatgacgannactaggagnntttttttttttttttttttttttttttttt

SEQ ID NO: 4216 - DNA, 84 bp, synthetic construct
  source 1..84: mol_type = other DNA
tttttttaagcagtggtatcaacgcagagtacnngatgacgannccatagganntttttttttttttttttttttttttttttt

SEQ ID NO: 4217 - DNA, 84 bp, synthetic construct
  source 1..84: mol_type = other DNA
tttttttaagcagtggtatcaacgcagagtacnngatgacgannggagaatcnntttttttttttttttttttttttttttttt

SEQ ID NO: 4218 - DNA, 84 bp, synthetic construct
  source 1..84: mol_type = other DNA
tttttttaagcagtggtatcaacgcagagtacnngatgacganngccaagaanntttttttttttttttttttttttttttttt

SEQ ID NO: 4219 - DNA, 84 bp, synthetic construct
  source 1..84: mol_type = other DNA
tttttttaagcagtggtatcaacgcagagtacnngatgacgannaaggcaagnntttttttttttttttttttttttttttttt

SEQ ID NO: 4220 - DNA, 84 bp, synthetic construct
  source 1..84: mol_type = other DNA
tttttttaagcagtggtatcaacgcagagtacnngatgacgannaatgtcgcnntttttttttttttttttttttttttttttt

SEQ ID NO: 4221 - DNA, 84 bp, synthetic construct
  source 1..84: mol_type = other DNA
tttttttaagcagtggtatcaacgcagagtacnngatgacgannatggaaccnntttttttttttttttttttttttttttttt

SEQ ID NO: 4222 - DNA, 84 bp, synthetic construct
  source 1..84: mol_type = other DNA
tttttttaagcagtggtatcaacgcagagtacnngatgacgannagaggcatnntttttttttttttttttttttttttttttt

SEQ ID NO: 4223 - DNA, 84 bp, synthetic construct
  source 1..84: mol_type = other DNA
tttttttaagcagtggtatcaacgcagagtacnngatgacganntgcatagcnntttttttttttttttttttttttttttttt

SEQ ID NO: 4224 - DNA, 84 bp, synthetic construct
  source 1..84: mol_type = other DNA
tttttttaagcagtggtatcaacgcagagtacnngatgacgannctaacgganntttttttttttttttttttttttttttttt

SEQ ID NO: 4225 - DNA, 84 bp, synthetic construct
  source 1..84: mol_type = other DNA
tttttttaagcagtggtatcaacgcagagtacnngatgacganntatcgaggnntttttttttttttttttttttttttttttt

SEQ ID NO: 4226 - DNA, 84 bp, synthetic construct
  source 1..84: mol_type = other DNA
tttttttaagcagtggtatcaacgcagagtacnngatgacganncatagcctnntttttttttttttttttttttttttttttt

SEQ ID NO: 4227 - DNA, 84 bp, synthetic construct
  source 1..84: mol_type = other DNA
tttttttaagcagtggtatcaacgcagagtacnngatgacgannatcgagacnntttttttttttttttttttttttttttttt

SEQ ID NO: 4228 - DNA, 84 bp, synthetic construct
  source 1..84: mol_type = other DNA
tttttttaagcagtggtatcaacgcagagtacnngatgacgannggaagagtnntttttttttttttttttttttttttttttt

SEQ ID NO: 4229 - DNA, 84 bp, synthetic construct
  source 1..84: mol_type = other DNA
tttttttaagcagtggtatcaacgcagagtacnngatgacgannccaagtagnntttttttttttttttttttttttttttttt

SEQ ID NO: 4230 - DNA, 84 bp, synthetic construct
  source 1..84: mol_type = other DNA
tttttttaagcagtggtatcaacgcagagtacnngatgacgannctgaacagnntttttttttttttttttttttttttttttt

SEQ ID NO: 4231 - DNA, 84 bp, synthetic construct
  source 1..84: mol_type = other DNA
tttttttaagcagtggtatcaacgcagagtacnngatgacganngtaggttcnntttttttttttttttttttttttttttttt

SEQ ID NO: 4232 - DNA, 84 bp, synthetic construct
  source 1..84: mol_type = other DNA
tttttttaagcagtggtatcaacgcagagtacnngatgacganngtatggacnntttttttttttttttttttttttttttttt

SEQ ID NO: 4233 - DNA, 84 bp, synthetic construct
  source 1..84: mol_type = other DNA
tttttttaagcagtggtatcaacgcagagtacnngatgacganntcgcaacanntttttttttttttttttttttttttttttt

SEQ ID NO: 4234 - DNA, 84 bp, synthetic construct
  source 1..84: mol_type = other DNA
tttttttaagcagtggtatcaacgcagagtacnngatgacgannccgctaatnntttttttttttttttttttttttttttttt

SEQ ID NO: 4235 - DNA, 84 bp, synthetic construct
  source 1..84: mol_type = other DNA
tttttttaagcagtggtatcaacgcagagtacnngatgacganngattcgcanntttttttttttttttttttttttttttttt

SEQ ID NO: 4236 - DNA, 84 bp, synthetic construct
  source 1..84: mol_type = other DNA
tttttttaagcagtggtatcaacgcagagtacnngatgacganncgatggaanntttttttttttttttttttttttttttttt

SEQ ID NO: 4237 - DNA, 84 bp, synthetic construct
  source 1..84: mol_type = other DNA
tttttttaagcagtggtatcaacgcagagtacnngatgacgannagcaagganntttttttttttttttttttttttttttttt

SEQ ID NO: 4238 - DNA, 84 bp, synthetic construct
  source 1..84: mol_type = other DNA
tttttttaagcagtggtatcaacgcagagtacnngatgacganncgtagcaanntttttttttttttttttttttttttttttt

SEQ ID NO: 4239 - DNA, 84 bp, synthetic construct
  source 1..84: mol_type = other DNA
tttttttaagcagtggtatcaacgcagagtacnngatgacganntggcagtanntttttttttttttttttttttttttttttt

SEQ ID NO: 4240 - DNA, 84 bp, synthetic construct
  source 1..84: mol_type = other DNA
tttttttaagcagtggtatcaacgcagagtacnngatgacganncggtagttnntttttttttttttttttttttttttttttt

SEQ ID NO: 4241 - DNA, 84 bp, synthetic construct
  source 1..84: mol_type = other DNA
tttttttaagcagtggtatcaacgcagagtacnngatgacganntgacttcgnntttttttttttttttttttttttttttttt

SEQ ID NO: 4242 - DNA, 84 bp, synthetic construct
  source 1..84: mol_type = other DNA
tttttttaagcagtggtatcaacgcagagtacnngatgacganngagtgcaanntttttttttttttttttttttttttttttt

SEQ ID NO: 4243 - DNA, 84 bp, synthetic construct
  source 1..84: mol_type = other DNA
tttttttaagcagtggtatcaacgcagagtacnngatgacgannacggtaacnntttttttttttttttttttttttttttttt

SEQ ID NO: 4244 - DNA, 84 bp, synthetic construct
  source 1..84: mol_type = other DNA
tttttttaagcagtggtatcaacgcagagtacnngatgacgannaagtggtgnntttttttttttttttttttttttttttttt

SEQ ID NO: 4245 - DNA, 84 bp, synthetic construct
  source 1..84: mol_type = other DNA
tttttttaagcagtggtatcaacgcagagtacnngatgacgannggagacaanntttttttttttttttttttttttttttttt

SEQ ID NO: 4246 - DNA, 84 bp, synthetic construct
  source 1..84: mol_type = other DNA
tttttttaagcagtggtatcaacgcagagtacnngatgacganntcaaggacnntttttttttttttttttttttttttttttt

SEQ ID NO: 4247 - DNA, 84 bp, synthetic construct
  source 1..84: mol_type = other DNA
tttttttaagcagtggtatcaacgcagagtacnngatgacgannaagagagcnntttttttttttttttttttttttttttttt

SEQ ID NO: 4248 - DNA, 84 bp, synthetic construct
  source 1..84: mol_type = other DNA
tttttttaagcagtggtatcaacgcagagtacnngatgacganncgagagatnntttttttttttttttttttttttttttttt

SEQ ID NO: 4249 - DNA, 84 bp, synthetic construct
  source 1..84: mol_type = other DNA
tttttttaagcagtggtatcaacgcagagtacnngatgacgannacagatggnntttttttttttttttttttttttttttttt

SEQ ID NO: 4250 - DNA, 84 bp, synthetic construct
  source 1..84: mol_type = other DNA
tttttttaagcagtggtatcaacgcagagtacnngatgacgannaggagtcanntttttttttttttttttttttttttttttt

SEQ ID NO: 4251 - DNA, 84 bp, synthetic construct
  source 1..84: mol_type = other DNA
tttttttaagcagtggtatcaacgcagagtacnngatgacganncgtgttacnntttttttttttttttttttttttttttttt

SEQ ID NO: 4252 - DNA, 84 bp, synthetic construct
  source 1..84: mol_type = other DNA
tttttttaagcagtggtatcaacgcagagtacnngatgacganntagtgtgcnntttttttttttttttttttttttttttttt

SEQ ID NO: 4253 - DNA, 84 bp, synthetic construct
  source 1..84: mol_type = other DNA
tttttttaagcagtggtatcaacgcagagtacnngatgacgannctcatgacnntttttttttttttttttttttttttttttt

SEQ ID NO: 4254 - DNA, 84 bp, synthetic construct
  source 1..84: mol_type = other DNA
tttttttaagcagtggtatcaacgcagagtacnngatgacganngtatccagnntttttttttttttttttttttttttttttt

SEQ ID NO: 4255 - DNA, 84 bp, synthetic construct
  source 1..84: mol_type = other DNA
tttttttaagcagtggtatcaacgcagagtacnngatgacgannacgcctatnntttttttttttttttttttttttttttttt

SEQ ID NO: 4256 - DNA, 84 bp, synthetic construct
  source 1..84: mol_type = other DNA
tttttttaagcagtggtatcaacgcagagtacnngatgacgannaacgacctnntttttttttttttttttttttttttttttt

SEQ ID NO: 4257 - DNA, 84 bp, synthetic construct
  source 1..84: mol_type = other DNA
tttttttaagcagtggtatcaacgcagagtacnngatgacgannatcaggctnntttttttttttttttttttttttttttttt

SEQ ID NO: 4258 - DNA, 84 bp, synthetic construct
  source 1..84: mol_type = other DNA
tttttttaagcagtggtatcaacgcagagtacnngatgacganncaagttcgnntttttttttttttttttttttttttttttt

SEQ ID NO: 4259 - DNA, 84 bp, synthetic construct
  source 1..84: mol_type = other DNA
tttttttaagcagtggtatcaacgcagagtacnngatgacganntagccaganntttttttttttttttttttttttttttttt

SEQ ID NO: 4260 - DNA, 84 bp, synthetic construct
  source 1..84: mol_type = other DNA
tttttttaagcagtggtatcaacgcagagtacnngatgacganncaatcacgnntttttttttttttttttttttttttttttt

SEQ ID NO: 4261 - DNA, 84 bp, synthetic construct
  source 1..84: mol_type = other DNA
tttttttaagcagtggtatcaacgcagagtacnngatgacganngcaacaagnntttttttttttttttttttttttttttttt

SEQ ID NO: 4262 - DNA, 84 bp, synthetic construct
  source 1..84: mol_type = other DNA
tttttttaagcagtggtatcaacgcagagtacnngatgacganncacgacaanntttttttttttttttttttttttttttttt

SEQ ID NO: 4263 - DNA, 84 bp, synthetic construct
  source 1..84: mol_type = other DNA
tttttttaagcagtggtatcaacgcagagtacnngatgacganntacggaganntttttttttttttttttttttttttttttt

SEQ ID NO: 4264 - DNA, 84 bp, synthetic construct
  source 1..84: mol_type = other DNA
tttttttaagcagtggtatcaacgcagagtacnngatgacganncgacaaganntttttttttttttttttttttttttttttt

SEQ ID NO: 4265 - DNA, 84 bp, synthetic construct
  source 1..84: mol_type = other DNA
tttttttaagcagtggtatcaacgcagagtacnngatgacganncgaagtganntttttttttttttttttttttttttttttt

SEQ ID NO: 4266 - DNA, 84 bp, synthetic construct
  source 1..84: mol_type = other DNA
tttttttaagcagtggtatcaacgcagagtacnngatgacgannagctggtanntttttttttttttttttttttttttttttt

SEQ ID NO: 4267 - DNA, 84 bp, synthetic construct
  source 1..84: mol_type = other DNA
tttttttaagcagtggtatcaacgcagagtacnngatgacgannaactaggcnntttttttttttttttttttttttttttttt

SEQ ID NO: 4268 - DNA, 84 bp, synthetic construct
  source 1..84: mol_type = other DNA
tttttttaagcagtggtatcaacgcagagtacnngatgacganncagcaagtnntttttttttttttttttttttttttttttt

SEQ ID NO: 4269 - DNA, 84 bp, synthetic construct
  source 1..84: mol_type = other DNA
tttttttaagcagtggtatcaacgcagagtacnngatgacgannacgaggtanntttttttttttttttttttttttttttttt

SEQ ID NO: 4270 - DNA, 84 bp, synthetic construct
  source 1..84: mol_type = other DNA
tttttttaagcagtggtatcaacgcagagtacnngatgacganncatcttccnntttttttttttttttttttttttttttttt

SEQ ID NO: 4271 - DNA, 84 bp, synthetic construct
  source 1..84: mol_type = other DNA
tttttttaagcagtggtatcaacgcagagtacnngatgacganncctgaatcnntttttttttttttttttttttttttttttt

SEQ ID NO: 4272 - DNA, 84 bp, synthetic construct
  source 1..84: mol_type = other DNA
tttttttaagcagtggtatcaacgcagagtacnngatgacganntgcagactnntttttttttttttttttttttttttttttt

SEQ ID NO: 4273 - DNA, 84 bp, synthetic construct
  source 1..84: mol_type = other DNA
tttttttaagcagtggtatcaacgcagagtacnngatgacgannagatgtggnntttttttttttttttttttttttttttttt

SEQ ID NO: 4274 - DNA, 84 bp, synthetic construct
  source 1..84: mol_type = other DNA
tttttttaagcagtggtatcaacgcagagtacnngatgacgannagttcgacnntttttttttttttttttttttttttttttt

SEQ ID NO: 4275 - DNA, 84 bp, synthetic construct
  source 1..84: mol_type = other DNA
tttttttaagcagtggtatcaacgcagagtacnngatgacgannacaacctcnntttttttttttttttttttttttttttttt

SEQ ID NO: 4276 - DNA, 84 bp, synthetic construct
  source 1..84: mol_type = other DNA
tttttttaagcagtggtatcaacgcagagtacnngatgacganncatggtagnntttttttttttttttttttttttttttttt

SEQ ID NO: 4277 - DNA, 84 bp, synthetic construct
  source 1..84: mol_type = other DNA
tttttttaagcagtggtatcaacgcagagtacnngatgacganncgtatctcnntttttttttttttttttttttttttttttt

SEQ ID NO: 4278 - DNA, 84 bp, synthetic construct
  source 1..84: mol_type = other DNA
tttttttaagcagtggtatcaacgcagagtacnngatgacganncctagttcnntttttttttttttttttttttttttttttt

SEQ ID NO: 4279 - DNA, 84 bp, synthetic construct
  source 1..84: mol_type = other DNA
tttttttaagcagtggtatcaacgcagagtacnngatgacganncaagagtcnntttttttttttttttttttttttttttttt

SEQ ID NO: 4280 - DNA, 84 bp, synthetic construct
  source 1..84: mol_type = other DNA
tttttttaagcagtggtatcaacgcagagtacnnatgtcgagnnaatcggcanntttttttttttttttttttttttttttttt

SEQ ID NO: 4281 - DNA, 84 bp, synthetic construct
  source 1..84: mol_type = other DNA
tttttttaagcagtggtatcaacgcagagtacnnatgtcgagnntacggcatnntttttttttttttttttttttttttttttt

SEQ ID NO: 4282 - DNA, 84 bp, synthetic construct
  source 1..84: mol_type = other DNA
tttttttaagcagtggtatcaacgcagagtacnnatgtcgagnnttggatcgnntttttttttttttttttttttttttttttt

SEQ ID NO: 4283 - DNA, 84 bp, synthetic construct
  source 1..84: mol_type = other DNA
tttttttaagcagtggtatcaacgcagagtacnnatgtcgagnntggaacganntttttttttttttttttttttttttttttt

SEQ ID NO: 4284 - DNA, 84 bp, synthetic construct
  source 1..84: mol_type = other DNA
tttttttaagcagtggtatcaacgcagagtacnnatgtcgagnnggcaatcanntttttttttttttttttttttttttttttt

SEQ ID NO: 4285 - DNA, 84 bp, synthetic construct
  source 1..84: mol_type = other DNA
tttttttaagcagtggtatcaacgcagagtacnnatgtcgagnngaatccganntttttttttttttttttttttttttttttt

SEQ ID NO: 4286 - DNA, 84 bp, synthetic construct
  source 1..84: mol_type = other DNA
tttttttaagcagtggtatcaacgcagagtacnnatgtcgagnnttacggtgnntttttttttttttttttttttttttttttt

SEQ ID NO: 4287 - DNA, 84 bp, synthetic construct
  source 1..84: mol_type = other DNA
tttttttaagcagtggtatcaacgcagagtacnnatgtcgagnncatatcggnntttttttttttttttttttttttttttttt

SEQ ID NO: 4288 - DNA, 84 bp, synthetic construct
  source 1..84: mol_type = other DNA
tttttttaagcagtggtatcaacgcagagtacnnatgtcgagnncttcggtanntttttttttttttttttttttttttttttt

SEQ ID NO: 4289 - DNA, 84 bp, synthetic construct
  source 1..84: mol_type = other DNA
tttttttaagcagtggtatcaacgcagagtacnnatgtcgagnntcctaacgnntttttttttttttttttttttttttttttt

SEQ ID NO: 4290 - DNA, 84 bp, synthetic construct
  source 1..84: mol_type = other DNA
tttttttaagcagtggtatcaacgcagagtacnnatgtcgagnngtaagccanntttttttttttttttttttttttttttttt

SEQ ID NO: 4291 - DNA, 84 bp, synthetic construct
  source 1..84: mol_type = other DNA
tttttttaagcagtggtatcaacgcagagtacnnatgtcgagnntaaggtggnntttttttttttttttttttttttttttttt

SEQ ID NO: 4292 - DNA, 84 bp, synthetic construct
  source 1..84: mol_type = other DNA
tttttttaagcagtggtatcaacgcagagtacnnatgtcgagnnggtaagctnntttttttttttttttttttttttttttttt

SEQ ID NO: 4293 - DNA, 84 bp, synthetic construct
  source 1..84: mol_type = other DNA
tttttttaagcagtggtatcaacgcagagtacnnatgtcgagnntgtgtcganntttttttttttttttttttttttttttttt

SEQ ID NO: 4294 - DNA, 84 bp, synthetic construct
  source 1..84: mol_type = other DNA
tttttttaagcagtggtatcaacgcagagtacnnatgtcgagnngagcatganntttttttttttttttttttttttttttttt

SEQ ID NO: 4295 - DNA, 84 bp, synthetic construct
  source 1..84: mol_type = other DNA
tttttttaagcagtggtatcaacgcagagtacnnatgtcgagnntcgaagtcnntttttttttttttttttttttttttttttt

SEQ ID NO: 4296 - DNA, 84 bp, synthetic construct
  source 1..84: mol_type = other DNA
tttttttaagcagtggtatcaacgcagagtacnnatgtcgagnnggtgaacanntttttttttttttttttttttttttttttt

SEQ ID NO: 4297 - DNA, 84 bp, synthetic construct
  source 1..84: mol_type = other DNA
tttttttaagcagtggtatcaacgcagagtacnnatgtcgagnnacatgcacnntttttttttttttttttttttttttttttt

SEQ ID NO: 4298 - DNA, 84 bp, synthetic construct
  source 1..84: mol_type = other DNA
tttttttaagcagtggtatcaacgcagagtacnnatgtcgagnnccaacagtnntttttttttttttttttttttttttttttt

SEQ ID NO: 4299 - DNA, 84 bp, synthetic construct
  source 1..84: mol_type = other DNA
tttttttaagcagtggtatcaacgcagagtacnnatgtcgagnnagaacagcnntttttttttttttttttttttttttttttt

SEQ ID NO: 4300 - DNA, 84 bp, synthetic construct
  source 1..84: mol_type = other DNA
tttttttaagcagtggtatcaacgcagagtacnnatgtcgagnngaacacgtnntttttttttttttttttttttttttttttt

SEQ ID NO: 4301 - DNA, 84 bp, synthetic construct
  source 1..84: mol_type = other DNA
tttttttaagcagtggtatcaacgcagagtacnnatgtcgagnnggtcttcanntttttttttttttttttttttttttttttt

SEQ ID NO: 4302 - DNA, 84 bp, synthetic construct
  source 1..84: mol_type = other DNA
tttttttaagcagtggtatcaacgcagagtacnnatgtcgagnnaggttcagnntttttttttttttttttttttttttttttt

SEQ ID NO: 4303 - DNA, 84 bp, synthetic construct
  source 1..84: mol_type = other DNA
tttttttaagcagtggtatcaacgcagagtacnnatgtcgagnnctagagcanntttttttttttttttttttttttttttttt

SEQ ID NO: 4304 - DNA, 84 bp, synthetic construct
  source 1..84: mol_type = other DNA
tttttttaagcagtggtatcaacgcagagtacnnatgtcgagnncttctagcnntttttttttttttttttttttttttttttt

SEQ ID NO: 4305 - DNA, 84 bp, synthetic construct
  source 1..84: mol_type = other DNA
tttttttaagcagtggtatcaacgcagagtacnnatgtcgagnngagtaacgnntttttttttttttttttttttttttttttt

SEQ ID NO: 4306 - DNA, 84 bp, synthetic construct
  source 1..84: mol_type = other DNA
tttttttaagcagtggtatcaacgcagagtacnnatgtcgagnnctaagaggnntttttttttttttttttttttttttttttt

SEQ ID NO: 4307 - DNA, 84 bp, synthetic construct
  source 1..84: mol_type = other DNA
tttttttaagcagtggtatcaacgcagagtacnnatgtcgagnnacgtgtagnntttttttttttttttttttttttttttttt

SEQ ID NO: 4308 - DNA, 84 bp, synthetic construct
  source 1..84: mol_type = other DNA
tttttttaagcagtggtatcaacgcagagtacnnatgtcgagnnactacaggnntttttttttttttttttttttttttttttt

SEQ ID NO: 4309 - DNA, 84 bp, synthetic construct
  source 1..84: mol_type = other DNA
tttttttaagcagtggtatcaacgcagagtacnnatgtcgagnntacaggtcnntttttttttttttttttttttttttttttt

SEQ ID NO: 4310 - DNA, 84 bp, synthetic construct
  source 1..84: mol_type = other DNA
tttttttaagcagtggtatcaacgcagagtacnnatgtcgagnnctcacatgnntttttttttttttttttttttttttttttt

SEQ ID NO: 4311 - DNA, 84 bp, synthetic construct
  source 1..84: mol_type = other DNA
tttttttaagcagtggtatcaacgcagagtacnnatgtcgagnnactaggagnntttttttttttttttttttttttttttttt

SEQ ID NO: 4312 - DNA, 84 bp, synthetic construct
  source 1..84: mol_type = other DNA
tttttttaagcagtggtatcaacgcagagtacnnatgtcgagnnccatagganntttttttttttttttttttttttttttttt

SEQ ID NO: 4313 - DNA, 84 bp, synthetic construct
  source 1..84: mol_type = other DNA
tttttttaagcagtggtatcaacgcagagtacnnatgtcgagnnggagaatcnntttttttttttttttttttttttttttttt

SEQ ID NO: 4314 - DNA, 84 bp, synthetic construct
  source 1..84: mol_type = other DNA
tttttttaagcagtggtatcaacgcagagtacnnatgtcgagnngccaagaanntttttttttttttttttttttttttttttt

SEQ ID NO: 4315 - DNA, 84 bp, synthetic construct
  source 1..84: mol_type = other DNA
tttttttaagcagtggtatcaacgcagagtacnnatgtcgagnnaaggcaagnntttttttttttttttttttttttttttttt

SEQ ID NO: 4316 - DNA, 84 bp, synthetic construct
  source 1..84: mol_type = other DNA
tttttttaagcagtggtatcaacgcagagtacnnatgtcgagnnaatgtcgcnntttttttttttttttttttttttttttttt

SEQ ID NO: 4317 - DNA, 84 bp, synthetic construct
  source 1..84: mol_type = other DNA
tttttttaagcagtggtatcaacgcagagtacnnatgtcgagnnatggaaccnntttttttttttttttttttttttttttttt

SEQ ID NO: 4318 - DNA, 84 bp, synthetic construct
  source 1..84: mol_type = other DNA
tttttttaagcagtggtatcaacgcagagtacnnatgtcgagnnagaggcatnntttttttttttttttttttttttttttttt

SEQ ID NO: 4319 - DNA, 84 bp, synthetic construct
  source 1..84: mol_type = other DNA
tttttttaagcagtggtatcaacgcagagtacnnatgtcgagnntgcatagcnntttttttttttttttttttttttttttttt

SEQ ID NO: 4320 - DNA, 84 bp, synthetic construct
  source 1..84: mol_type = other DNA
tttttttaagcagtggtatcaacgcagagtacnnatgtcgagnnctaacgganntttttttttttttttttttttttttttttt

SEQ ID NO: 4321 - DNA, 84 bp, synthetic construct
  source 1..84: mol_type = other DNA
tttttttaagcagtggtatcaacgcagagtacnnatgtcgagnntatcgaggnntttttttttttttttttttttttttttttt

SEQ ID NO: 4322 - DNA, 84 bp, synthetic construct
  source 1..84: mol_type = other DNA
tttttttaagcagtggtatcaacgcagagtacnnatgtcgagnncatagcctnntttttttttttttttttttttttttttttt

SEQ ID NO: 4323 - DNA, 84 bp, synthetic construct
  source 1..84: mol_type = other DNA
tttttttaagcagtggtatcaacgcagagtacnnatgtcgagnnatcgagacnntttttttttttttttttttttttttttttt

SEQ ID NO: 4324 - DNA, 84 bp, synthetic construct
  source 1..84: mol_type = other DNA
tttttttaagcagtggtatcaacgcagagtacnnatgtcgagnnggaagagtnntttttttttttttttttttttttttttttt

SEQ ID NO: 4325 - DNA, 84 bp, synthetic construct
  source 1..84: mol_type = other DNA
tttttttaagcagtggtatcaacgcagagtacnnatgtcgagnnccaagtagnntttttttttttttttttttttttttttttt

SEQ ID NO: 4326 - DNA, 84 bp, synthetic construct
  source 1..84: mol_type = other DNA
tttttttaagcagtggtatcaacgcagagtacnnatgtcgagnnctgaacagnntttttttttttttttttttttttttttttt

SEQ ID NO: 4327 - DNA, 84 bp, synthetic construct
  source 1..84: mol_type = other DNA
tttttttaagcagtggtatcaacgcagagtacnnatgtcgagnngtaggttcnntttttttttttttttttttttttttttttt

SEQ ID NO: 4328 - DNA, 84 bp, synthetic construct
  source 1..84: mol_type = other DNA
tttttttaagcagtggtatcaacgcagagtacnnatgtcgagnngtatggacnntttttttttttttttttttttttttttttt

SEQ ID NO: 4329 - DNA, 84 bp, synthetic construct
  source 1..84: mol_type = other DNA
tttttttaagcagtggtatcaacgcagagtacnnatgtcgagnntcgcaacanntttttttttttttttttttttttttttttt

SEQ ID NO: 4330 - DNA, 84 bp, synthetic construct
  source 1..84: mol_type = other DNA
tttttttaagcagtggtatcaacgcagagtacnnatgtcgagnnccgctaatnntttttttttttttttttttttttttttttt

SEQ ID NO: 4331 - DNA, 84 bp, synthetic construct
  source 1..84: mol_type = other DNA
tttttttaagcagtggtatcaacgcagagtacnnatgtcgagnngattcgcanntttttttttttttttttttttttttttttt

SEQ ID NO: 4332 - DNA, 84 bp, synthetic construct
  source 1..84: mol_type = other DNA
tttttttaagcagtggtatcaacgcagagtacnnatgtcgagnncgatggaanntttttttttttttttttttttttttttttt

SEQ ID NO: 4333 - DNA, 84 bp, synthetic construct
  source 1..84: mol_type = other DNA
tttttttaagcagtggtatcaacgcagagtacnnatgtcgagnnagcaagganntttttttttttttttttttttttttttttt

SEQ ID NO: 4334 - DNA, 84 bp, synthetic construct
  source 1..84: mol_type = other DNA
tttttttaagcagtggtatcaacgcagagtacnnatgtcgagnncgtagcaanntttttttttttttttttttttttttttttt

SEQ ID NO: 4335 - DNA, 84 bp, synthetic construct
  source 1..84: mol_type = other DNA
tttttttaagcagtggtatcaacgcagagtacnnatgtcgagnntggcagtanntttttttttttttttttttttttttttttt

SEQ ID NO: 4336 - DNA, 84 bp, synthetic construct
  source 1..84: mol_type = other DNA
tttttttaagcagtggtatcaacgcagagtacnnatgtcgagnncggtagttnntttttttttttttttttttttttttttttt

SEQ ID NO: 4337 - DNA, 84 bp, synthetic construct
  source 1..84: mol_type = other DNA
tttttttaagcagtggtatcaacgcagagtacnnatgtcgagnntgacttcgnntttttttttttttttttttttttttttttt

SEQ ID NO: 4338 - DNA, 84 bp, synthetic construct
  source 1..84: mol_type = other DNA
tttttttaagcagtggtatcaacgcagagtacnnatgtcgagnngagtgcaanntttttttttttttttttttttttttttttt

SEQ ID NO: 4339 - DNA, 84 bp, synthetic construct
  source 1..84: mol_type = other DNA
tttttttaagcagtggtatcaacgcagagtacnnatgtcgagnnacggtaacnntttttttttttttttttttttttttttttt

SEQ ID NO: 4340 - DNA, 84 bp, synthetic construct
  source 1..84: mol_type = other DNA
tttttttaagcagtggtatcaacgcagagtacnnatgtcgagnnaagtggtgnntttttttttttttttttttttttttttttt

SEQ ID NO: 4341 - DNA, 84 bp, synthetic construct
  source 1..84: mol_type = other DNA
tttttttaagcagtggtatcaacgcagagtacnnatgtcgagnnggagacaanntttttttttttttttttttttttttttttt

SEQ ID NO: 4342 - DNA, 84 bp, synthetic construct
  source 1..84: mol_type = other DNA
tttttttaagcagtggtatcaacgcagagtacnnatgtcgagnntcaaggacnntttttttttttttttttttttttttttttt

SEQ ID NO: 4343 - DNA, 84 bp, synthetic construct
  source 1..84: mol_type = other DNA
tttttttaagcagtggtatcaacgcagagtacnnatgtcgagnnaagagagcnntttttttttttttttttttttttttttttt

SEQ ID NO: 4344 - DNA, 84 bp, synthetic construct
  source 1..84: mol_type = other DNA
tttttttaagcagtggtatcaacgcagagtacnnatgtcgagnncgagagatnntttttttttttttttttttttttttttttt

SEQ ID NO: 4345 - DNA, 84 bp, synthetic construct
  source 1..84: mol_type = other DNA
tttttttaagcagtggtatcaacgcagagtacnnatgtcgagnnacagatggnntttttttttttttttttttttttttttttt

SEQ ID NO: 4346 - DNA, 84 bp, synthetic construct
  source 1..84: mol_type = other DNA
tttttttaagcagtggtatcaacgcagagtacnnatgtcgagnnaggagtcanntttttttttttttttttttttttttttttt

SEQ ID NO: 4347 - DNA, 84 bp, synthetic construct
  source 1..84: mol_type = other DNA
tttttttaagcagtggtatcaacgcagagtacnnatgtcgagnncgtgttacnntttttttttttttttttttttttttttttt

SEQ ID NO: 4348 - DNA, 84 bp, synthetic construct
  source 1..84: mol_type = other DNA
tttttttaagcagtggtatcaacgcagagtacnnatgtcgagnntagtgtgcnntttttttttttttttttttttttttttttt

SEQ ID NO: 4349 - DNA, 84 bp, synthetic construct
  source 1..84: mol_type = other DNA
tttttttaagcagtggtatcaacgcagagtacnnatgtcgagnnctcatgacnntttttttttttttttttttttttttttttt

SEQ ID NO: 4350 - DNA, 84 bp, synthetic construct
  source 1..84: mol_type = other DNA
tttttttaagcagtggtatcaacgcagagtacnnatgtcgagnngtatccagnntttttttttttttttttttttttttttttt

SEQ ID NO: 4351 - DNA, 84 bp, synthetic construct
  source 1..84: mol_type = other DNA
tttttttaagcagtggtatcaacgcagagtacnnatgtcgagnnacgcctatnntttttttttttttttttttttttttttttt

SEQ ID NO: 4352 - DNA, 84 bp, synthetic construct
  source 1..84: mol_type = other DNA
tttttttaagcagtggtatcaacgcagagtacnnatgtcgagnnaacgacctnntttttttttttttttttttttttttttttt

SEQ ID NO: 4353 - DNA, 84 bp, synthetic construct
  source 1..84: mol_type = other DNA
tttttttaagcagtggtatcaacgcagagtacnnatgtcgagnnatcaggctnntttttttttttttttttttttttttttttt

SEQ ID NO: 4354 - DNA, 84 bp, synthetic construct
  source 1..84: mol_type = other DNA
tttttttaagcagtggtatcaacgcagagtacnnatgtcgagnncaagttcgnntttttttttttttttttttttttttttttt

SEQ ID NO: 4355 - DNA, 84 bp, synthetic construct
  source 1..84: mol_type = other DNA
tttttttaagcagtggtatcaacgcagagtacnnatgtcgagnntagccaganntttttttttttttttttttttttttttttt

SEQ ID NO: 4356 - DNA, 84 bp, synthetic construct
  source 1..84: mol_type = other DNA
tttttttaagcagtggtatcaacgcagagtacnnatgtcgagnncaatcacgnntttttttttttttttttttttttttttttt

SEQ ID NO: 4357 - DNA, 84 bp, synthetic construct
  source 1..84: mol_type = other DNA
tttttttaagcagtggtatcaacgcagagtacnnatgtcgagnngcaacaagnntttttttttttttttttttttttttttttt

SEQ ID NO: 4358 - DNA, 84 bp, synthetic construct
  source 1..84: mol_type = other DNA
tttttttaagcagtggtatcaacgcagagtacnnatgtcgagnncacgacaanntttttttttttttttttttttttttttttt

SEQ ID NO: 4359 - DNA, 84 bp, synthetic construct
  source 1..84: mol_type = other DNA
tttttttaagcagtggtatcaacgcagagtacnnatgtcgagnntacggaganntttttttttttttttttttttttttttttt

SEQ ID NO: 4360 - DNA, 84 bp, synthetic construct
  source 1..84: mol_type = other DNA
tttttttaagcagtggtatcaacgcagagtacnnatgtcgagnncgacaaganntttttttttttttttttttttttttttttt

SEQ ID NO: 4361 - DNA, 84 bp, synthetic construct
  source 1..84: mol_type = other DNA
tttttttaagcagtggtatcaacgcagagtacnnatgtcgagnncgaagtganntttttttttttttttttttttttttttttt

SEQ ID NO: 4362 - DNA, 84 bp, synthetic construct
  source 1..84: mol_type = other DNA
tttttttaagcagtggtatcaacgcagagtacnnatgtcgagnnagctggtanntttttttttttttttttttttttttttttt

SEQ ID NO: 4363 - DNA, 84 bp, synthetic construct
  source 1..84: mol_type = other DNA
tttttttaagcagtggtatcaacgcagagtacnnatgtcgagnnaactaggcnntttttttttttttttttttttttttttttt

SEQ ID NO: 4364 - DNA, 84 bp, synthetic construct
  source 1..84: mol_type = other DNA
tttttttaagcagtggtatcaacgcagagtacnnatgtcgagnncagcaagtnntttttttttttttttttttttttttttttt

SEQ ID NO: 4365 - DNA, 84 bp, synthetic construct
  source 1..84: mol_type = other DNA
tttttttaagcagtggtatcaacgcagagtacnnatgtcgagnnacgaggtanntttttttttttttttttttttttttttttt

SEQ ID NO: 4366 - DNA, 84 bp, synthetic construct
  source 1..84: mol_type = other DNA
tttttttaagcagtggtatcaacgcagagtacnnatgtcgagnncatcttccnntttttttttttttttttttttttttttttt

SEQ ID NO: 4367 - DNA, 84 bp, synthetic construct
  source 1..84: mol_type = other DNA
tttttttaagcagtggtatcaacgcagagtacnnatgtcgagnncctgaatcnntttttttttttttttttttttttttttttt

SEQ ID NO: 4368 - DNA, 84 bp, synthetic construct
  source 1..84: mol_type = other DNA
tttttttaagcagtggtatcaacgcagagtacnnatgtcgagnntgcagactnntttttttttttttttttttttttttttttt

SEQ ID NO: 4369 - DNA, 84 bp, synthetic construct
  source 1..84: mol_type = other DNA
tttttttaagcagtggtatcaacgcagagtacnnatgtcgagnnagatgtggnntttttttttttttttttttttttttttttt

SEQ ID NO: 4370 - DNA, 84 bp, synthetic construct
  source 1..84: mol_type = other DNA
tttttttaagcagtggtatcaacgcagagtacnnatgtcgagnnagttcgacnntttttttttttttttttttttttttttttt

SEQ ID NO: 4371 - DNA, 84 bp, synthetic construct
  source 1..84: mol_type = other DNA
tttttttaagcagtggtatcaacgcagagtacnnatgtcgagnnacaacctcnntttttttttttttttttttttttttttttt

SEQ ID NO: 4372 - DNA, 84 bp, synthetic construct
  source 1..84: mol_type = other DNA
tttttttaagcagtggtatcaacgcagagtacnnatgtcgagnncatggtagnntttttttttttttttttttttttttttttt

SEQ ID NO: 4373 - DNA, 84 bp, synthetic construct
  source 1..84: mol_type = other DNA
tttttttaagcagtggtatcaacgcagagtacnnatgtcgagnncgtatctcnntttttttttttttttttttttttttttttt

SEQ ID NO: 4374 - DNA, 84 bp, synthetic construct
  source 1..84: mol_type = other DNA
tttttttaagcagtggtatcaacgcagagtacnnatgtcgagnncctagttcnntttttttttttttttttttttttttttttt

SEQ ID NO: 4375 - DNA, 84 bp, synthetic construct
  source 1..84: mol_type = other DNA
tttttttaagcagtggtatcaacgcagagtacnnatgtcgagnncaagagtcnntttttttttttttttttttttttttttttt

SEQ ID NO: 4376 - DNA, 84 bp, synthetic construct
  source 1..84: mol_type = other DNA
tttttttaagcagtggtatcaacgcagagtacnnaacgtgtcnnaatcggcanntttttttttttttttttttttttttttttt

SEQ ID NO: 4377 - DNA, 84 bp, synthetic construct
  source 1..84: mol_type = other DNA
tttttttaagcagtggtatcaacgcagagtacnnaacgtgtcnntacggcatnntttttttttttttttttttttttttttttt

SEQ ID NO: 4378 - DNA, 84 bp, synthetic construct
  source 1..84: mol_type = other DNA
tttttttaagcagtggtatcaacgcagagtacnnaacgtgtcnnttggatcgnntttttttttttttttttttttttttttttt

SEQ ID NO: 4379 - DNA, 84 bp, synthetic construct
  source 1..84: mol_type = other DNA
tttttttaagcagtggtatcaacgcagagtacnnaacgtgtcnntggaacganntttttttttttttttttttttttttttttt

SEQ ID NO: 4380 - DNA, 84 bp, synthetic construct
  source 1..84: mol_type = other DNA
tttttttaagcagtggtatcaacgcagagtacnnaacgtgtcnnggcaatcanntttttttttttttttttttttttttttttt

SEQ ID NO: 4381 - DNA, 84 bp, synthetic construct
  source 1..84: mol_type = other DNA
tttttttaagcagtggtatcaacgcagagtacnnaacgtgtcnngaatccganntttttttttttttttttttttttttttttt

SEQ ID NO: 4382 - DNA, 84 bp, synthetic construct
  source 1..84: mol_type = other DNA
tttttttaagcagtggtatcaacgcagagtacnnaacgtgtcnnttacggtgnntttttttttttttttttttttttttttttt

SEQ ID NO: 4383 - DNA, 84 bp, synthetic construct
  source 1..84: mol_type = other DNA
tttttttaagcagtggtatcaacgcagagtacnnaacgtgtcnncatatcggnntttttttttttttttttttttttttttttt

SEQ ID NO: 4384 - DNA, 84 bp, synthetic construct
  source 1..84: mol_type = other DNA
tttttttaagcagtggtatcaacgcagagtacnnaacgtgtcnncttcggtanntttttttttttttttttttttttttttttt

SEQ ID NO: 4385 - DNA, 84 bp, synthetic construct
  source 1..84: mol_type = other DNA
tttttttaagcagtggtatcaacgcagagtacnnaacgtgtcnntcctaacgnntttttttttttttttttttttttttttttt

SEQ ID NO: 4386 - DNA, 84 bp, synthetic construct
  source 1..84: mol_type = other DNA
tttttttaagcagtggtatcaacgcagagtacnnaacgtgtcnngtaagccanntttttttttttttttttttttttttttttt

SEQ ID NO: 4387 - DNA, 84 bp, synthetic construct
  source 1..84: mol_type = other DNA
tttttttaagcagtggtatcaacgcagagtacnnaacgtgtcnntaaggtggnntttttttttttttttttttttttttttttt

SEQ ID NO: 4388 - DNA, 84 bp, synthetic construct
  source 1..84: mol_type = other DNA
tttttttaagcagtggtatcaacgcagagtacnnaacgtgtcnnggtaagctnntttttttttttttttttttttttttttttt

SEQ ID NO: 4389 - DNA, 84 bp, synthetic construct
  source 1..84: mol_type = other DNA
tttttttaagcagtggtatcaacgcagagtacnnaacgtgtcnntgtgtcganntttttttttttttttttttttttttttttt

SEQ ID NO: 4390 - DNA, 84 bp, synthetic construct
  source 1..84: mol_type = other DNA
tttttttaagcagtggtatcaacgcagagtacnnaacgtgtcnngagcatganntttttttttttttttttttttttttttttt

SEQ ID NO: 4391 - DNA, 84 bp, synthetic construct
  source 1..84: mol_type = other DNA
tttttttaagcagtggtatcaacgcagagtacnnaacgtgtcnntcgaagtcnntttttttttttttttttttttttttttttt

SEQ ID NO: 4392 - DNA, 84 bp, synthetic construct
  source 1..84: mol_type = other DNA
tttttttaagcagtggtatcaacgcagagtacnnaacgtgtcnnggtgaacanntttttttttttttttttttttttttttttt

SEQ ID NO: 4393 - DNA, 84 bp, synthetic construct
  source 1..84: mol_type = other DNA
tttttttaagcagtggtatcaacgcagagtacnnaacgtgtcnnacatgcacnntttttttttttttttttttttttttttttt

SEQ ID NO: 4394 - DNA, 84 bp, synthetic construct
  source 1..84: mol_type = other DNA
tttttttaagcagtggtatcaacgcagagtacnnaacgtgtcnnccaacagtnntttttttttttttttttttttttttttttt

SEQ ID NO: 4395 - DNA, 84 bp, synthetic construct
  source 1..84: mol_type = other DNA
tttttttaagcagtggtatcaacgcagagtacnnaacgtgtcnnagaacagcnntttttttttttttttttttttttttttttt

SEQ ID NO: 4396 - DNA, 84 bp, synthetic construct
  source 1..84: mol_type = other DNA
tttttttaagcagtggtatcaacgcagagtacnnaacgtgtcnngaacacgtnntttttttttttttttttttttttttttttt

SEQ ID NO: 4397 - DNA, 84 bp, synthetic construct
  source 1..84: mol_type = other DNA
tttttttaagcagtggtatcaacgcagagtacnnaacgtgtcnnggtcttcanntttttttttttttttttttttttttttttt

SEQ ID NO: 4398 - DNA, 84 bp, synthetic construct
  source 1..84: mol_type = other DNA
tttttttaagcagtggtatcaacgcagagtacnnaacgtgtcnnaggttcagnntttttttttttttttttttttttttttttt

SEQ ID NO: 4399 - DNA, 84 bp, synthetic construct
  source 1..84: mol_type = other DNA
tttttttaagcagtggtatcaacgcagagtacnnaacgtgtcnnctagagcanntttttttttttttttttttttttttttttt

SEQ ID NO: 4400 - DNA, 84 bp, synthetic construct
  source 1..84: mol_type = other DNA
tttttttaagcagtggtatcaacgcagagtacnnaacgtgtcnncttctagcnntttttttttttttttttttttttttttttt

SEQ ID NO: 4401 - DNA, 84 bp, synthetic construct
  source 1..84: mol_type = other DNA
tttttttaagcagtggtatcaacgcagagtacnnaacgtgtcnngagtaacgnntttttttttttttttttttttttttttttt

SEQ ID NO: 4402 - DNA, 84 bp, synthetic construct
  source 1..84: mol_type = other DNA
tttttttaagcagtggtatcaacgcagagtacnnaacgtgtcnnctaagaggnntttttttttttttttttttttttttttttt

SEQ ID NO: 4403 - DNA, 84 bp, synthetic construct
  source 1..84: mol_type = other DNA
tttttttaagcagtggtatcaacgcagagtacnnaacgtgtcnnacgtgtagnntttttttttttttttttttttttttttttt

SEQ ID NO: 4404 - DNA, 84 bp, synthetic construct
  source 1..84: mol_type = other DNA
tttttttaagcagtggtatcaacgcagagtacnnaacgtgtcnnactacaggnntttttttttttttttttttttttttttttt

SEQ ID NO: 4405 - DNA, 84 bp, synthetic construct
  source 1..84: mol_type = other DNA
tttttttaagcagtggtatcaacgcagagtacnnaacgtgtcnntacaggtcnntttttttttttttttttttttttttttttt

SEQ ID NO: 4406 - DNA, 84 bp, synthetic construct
  source 1..84: mol_type = other DNA
tttttttaagcagtggtatcaacgcagagtacnnaacgtgtcnnctcacatgnntttttttttttttttttttttttttttttt

SEQ ID NO: 4407 - DNA, 84 bp, synthetic construct
  source 1..84: mol_type = other DNA
tttttttaagcagtggtatcaacgcagagtacnnaacgtgtcnnactaggagnntttttttttttttttttttttttttttttt

SEQ ID NO: 4408 - DNA, 84 bp, synthetic construct
  source 1..84: mol_type = other DNA
tttttttaagcagtggtatcaacgcagagtacnnaacgtgtcnnccatagganntttttttttttttttttttttttttttttt

SEQ ID NO: 4409 - DNA, 84 bp, synthetic construct
  source 1..84: mol_type = other DNA
tttttttaagcagtggtatcaacgcagagtacnnaacgtgtcnnggagaatcnntttttttttttttttttttttttttttttt

SEQ ID NO: 4410 - DNA, 84 bp, synthetic construct
  source 1..84: mol_type = other DNA
tttttttaagcagtggtatcaacgcagagtacnnaacgtgtcnngccaagaanntttttttttttttttttttttttttttttt

SEQ ID NO: 4411 - DNA, 84 bp, synthetic construct
  source 1..84: mol_type = other DNA
tttttttaagcagtggtatcaacgcagagtacnnaacgtgtcnnaaggcaagnntttttttttttttttttttttttttttttt

SEQ ID NO: 4412 - DNA, 84 bp, synthetic construct
  source 1..84: mol_type = other DNA
tttttttaagcagtggtatcaacgcagagtacnnaacgtgtcnnaatgtcgcnntttttttttttttttttttttttttttttt

SEQ ID NO: 4413 - DNA, 84 bp, synthetic construct
  source 1..84: mol_type = other DNA
tttttttaagcagtggtatcaacgcagagtacnnaacgtgtcnnatggaaccnntttttttttttttttttttttttttttttt

SEQ ID NO: 4414 - DNA, 84 bp, synthetic construct
  source 1..84: mol_type = other DNA
tttttttaagcagtggtatcaacgcagagtacnnaacgtgtcnnagaggcatnntttttttttttttttttttttttttttttt

SEQ ID NO: 4415 - DNA, 84 bp, synthetic construct
  source 1..84: mol_type = other DNA
tttttttaagcagtggtatcaacgcagagtacnnaacgtgtcnntgcatagcnntttttttttttttttttttttttttttttt

SEQ ID NO: 4416 - DNA, 84 bp, synthetic construct
  source 1..84: mol_type = other DNA
tttttttaagcagtggtatcaacgcagagtacnnaacgtgtcnnctaacgganntttttttttttttttttttttttttttttt

SEQ ID NO: 4417 - DNA, 84 bp, synthetic construct
  source 1..84: mol_type = other DNA
tttttttaagcagtggtatcaacgcagagtacnnaacgtgtcnntatcgaggnntttttttttttttttttttttttttttttt

SEQ ID NO: 4418 - DNA, 84 bp, synthetic construct
  source 1..84: mol_type = other DNA
tttttttaagcagtggtatcaacgcagagtacnnaacgtgtcnncatagcctnntttttttttttttttttttttttttttttt

SEQ ID NO: 4419 - DNA, 84 bp, synthetic construct
  source 1..84: mol_type = other DNA
tttttttaagcagtggtatcaacgcagagtacnnaacgtgtcnnatcgagacnntttttttttttttttttttttttttttttt

SEQ ID NO: 4420 - DNA, 84 bp, synthetic construct
  source 1..84: mol_type = other DNA
tttttttaagcagtggtatcaacgcagagtacnnaacgtgtcnnggaagagtnntttttttttttttttttttttttttttttt

SEQ ID NO: 4421 - DNA, 84 bp, synthetic construct
  source 1..84: mol_type = other DNA
tttttttaagcagtggtatcaacgcagagtacnnaacgtgtcnnccaagtagnntttttttttttttttttttttttttttttt

SEQ ID NO: 4422 - DNA, 84 bp, synthetic construct
  source 1..84: mol_type = other DNA
tttttttaagcagtggtatcaacgcagagtacnnaacgtgtcnnctgaacagnntttttttttttttttttttttttttttttt

SEQ ID NO: 4423 - DNA, 84 bp, synthetic construct
  source 1..84: mol_type = other DNA
tttttttaagcagtggtatcaacgcagagtacnnaacgtgtcnngtaggttcnntttttttttttttttttttttttttttttt

SEQ ID NO: 4424 - DNA, 84 bp, synthetic construct
  source 1..84: mol_type = other DNA
tttttttaagcagtggtatcaacgcagagtacnnaacgtgtcnngtatggacnntttttttttttttttttttttttttttttt

SEQ ID NO: 4425 - DNA, 84 bp, synthetic construct
  source 1..84: mol_type = other DNA
tttttttaagcagtggtatcaacgcagagtacnnaacgtgtcnntcgcaacanntttttttttttttttttttttttttttttt

SEQ ID NO: 4426 - DNA, 84 bp, synthetic construct
  source 1..84: mol_type = other DNA
tttttttaagcagtggtatcaacgcagagtacnnaacgtgtcnnccgctaatnntttttttttttttttttttttttttttttt

SEQ ID NO: 4427 - DNA, 84 bp, synthetic construct
  source 1..84: mol_type = other DNA
tttttttaagcagtggtatcaacgcagagtacnnaacgtgtcnngattcgcanntttttttttttttttttttttttttttttt

SEQ ID NO: 4428 - DNA, 84 bp, synthetic construct
  source 1..84: mol_type = other DNA
tttttttaagcagtggtatcaacgcagagtacnnaacgtgtcnncgatggaanntttttttttttttttttttttttttttttt

SEQ ID NO: 4429 - DNA, 84 bp, synthetic construct
  source 1..84: mol_type = other DNA
tttttttaagcagtggtatcaacgcagagtacnnaacgtgtcnnagcaagganntttttttttttttttttttttttttttttt

SEQ ID NO: 4430 - DNA, 84 bp, synthetic construct
  source 1..84: mol_type = other DNA
tttttttaagcagtggtatcaacgcagagtacnnaacgtgtcnncgtagcaanntttttttttttttttttttttttttttttt

SEQ ID NO: 4431 - DNA, 84 bp, synthetic construct
  source 1..84: mol_type = other DNA
tttttttaagcagtggtatcaacgcagagtacnnaacgtgtcnntggcagtanntttttttttttttttttttttttttttttt

SEQ ID NO: 4432 - DNA, 84 bp, synthetic construct
  source 1..84: mol_type = other DNA
tttttttaagcagtggtatcaacgcagagtacnnaacgtgtcnncggtagttnntttttttttttttttttttttttttttttt

SEQ ID NO: 4433 - DNA, 84 bp, synthetic construct
  source 1..84: mol_type = other DNA
tttttttaagcagtggtatcaacgcagagtacnnaacgtgtcnntgacttcgnntttttttttttttttttttttttttttttt

SEQ ID NO: 4434 - DNA, 84 bp, synthetic construct
  source 1..84: mol_type = other DNA
tttttttaagcagtggtatcaacgcagagtacnnaacgtgtcnngagtgcaanntttttttttttttttttttttttttttttt

SEQ ID NO: 4435 - DNA, 84 bp, synthetic construct
  source 1..84: mol_type = other DNA
tttttttaagcagtggtatcaacgcagagtacnnaacgtgtcnnacggtaacnntttttttttttttttttttttttttttttt

SEQ ID NO: 4436 - DNA, 84 bp, synthetic construct
  source 1..84: mol_type = other DNA
tttttttaagcagtggtatcaacgcagagtacnnaacgtgtcnnaagtggtgnntttttttttttttttttttttttttttttt

SEQ ID NO: 4437 - DNA, 84 bp, synthetic construct
  source 1..84: mol_type = other DNA
tttttttaagcagtggtatcaacgcagagtacnnaacgtgtcnnggagacaanntttttttttttttttttttttttttttttt

SEQ ID NO: 4438 - DNA, 84 bp, synthetic construct
  source 1..84: mol_type = other DNA
tttttttaagcagtggtatcaacgcagagtacnnaacgtgtcnntcaaggacnntttttttttttttttttttttttttttttt

SEQ ID NO: 4439 - DNA, 84 bp, synthetic construct
  source 1..84: mol_type = other DNA
tttttttaagcagtggtatcaacgcagagtacnnaacgtgtcnnaagagagcnntttttttttttttttttttttttttttttt

SEQ ID NO: 4440 - DNA, 84 bp, synthetic construct
  source 1..84: mol_type = other DNA
tttttttaagcagtggtatcaacgcagagtacnnaacgtgtcnncgagagatnntttttttttttttttttttttttttttttt

SEQ ID NO: 4441 - DNA, 84 bp, synthetic construct
  source 1..84: mol_type = other DNA
tttttttaagcagtggtatcaacgcagagtacnnaacgtgtcnnacagatggnntttttttttttttttttttttttttttttt

SEQ ID NO: 4442 - DNA, 84 bp, synthetic construct
  source 1..84: mol_type = other DNA
tttttttaagcagtggtatcaacgcagagtacnnaacgtgtcnnaggagtcanntttttttttttttttttttttttttttttt

SEQ ID NO: 4443 - DNA, 84 bp, synthetic construct
  source 1..84: mol_type = other DNA
tttttttaagcagtggtatcaacgcagagtacnnaacgtgtcnncgtgttacnntttttttttttttttttttttttttttttt

SEQ ID NO: 4444 - DNA, 84 bp, synthetic construct
  source 1..84: mol_type = other DNA
tttttttaagcagtggtatcaacgcagagtacnnaacgtgtcnntagtgtgcnntttttttttttttttttttttttttttttt

SEQ ID NO: 4445 - DNA, 84 bp, synthetic construct
  source 1..84: mol_type = other DNA
tttttttaagcagtggtatcaacgcagagtacnnaacgtgtcnnctcatgacnntttttttttttttttttttttttttttttt

SEQ ID NO: 4446 - DNA, 84 bp, synthetic construct
  source 1..84: mol_type = other DNA
tttttttaagcagtggtatcaacgcagagtacnnaacgtgtcnngtatccagnntttttttttttttttttttttttttttttt

SEQ ID NO: 4447 - DNA, 84 bp, synthetic construct
  source 1..84: mol_type = other DNA
tttttttaagcagtggtatcaacgcagagtacnnaacgtgtcnnacgcctatnntttttttttttttttttttttttttttttt

SEQ ID NO: 4448 - DNA, 84 bp, synthetic construct
  source 1..84: mol_type = other DNA
tttttttaagcagtggtatcaacgcagagtacnnaacgtgtcnnaacgacctnntttttttttttttttttttttttttttttt

SEQ ID NO: 4449 - DNA, 84 bp, synthetic construct
  source 1..84: mol_type = other DNA
tttttttaagcagtggtatcaacgcagagtacnnaacgtgtcnnatcaggctnntttttttttttttttttttttttttttttt

SEQ ID NO: 4450 - DNA, 84 bp, synthetic construct
  source 1..84: mol_type = other DNA
tttttttaagcagtggtatcaacgcagagtacnnaacgtgtcnncaagttcgnntttttttttttttttttttttttttttttt

SEQ ID NO: 4451 - DNA, 84 bp, synthetic construct
  source 1..84: mol_type = other DNA
tttttttaagcagtggtatcaacgcagagtacnnaacgtgtcnntagccaganntttttttttttttttttttttttttttttt

SEQ ID NO: 4452 - DNA, 84 bp, synthetic construct
  source 1..84: mol_type = other DNA
tttttttaagcagtggtatcaacgcagagtacnnaacgtgtcnncaatcacgnntttttttttttttttttttttttttttttt

SEQ ID NO: 4453 - DNA, 84 bp, synthetic construct
  source 1..84: mol_type = other DNA
tttttttaagcagtggtatcaacgcagagtacnnaacgtgtcnngcaacaagnntttttttttttttttttttttttttttttt

SEQ ID NO: 4454 - DNA, 84 bp, synthetic construct
  source 1..84: mol_type = other DNA
tttttttaagcagtggtatcaacgcagagtacnnaacgtgtcnncacgacaanntttttttttttttttttttttttttttttt

SEQ ID NO: 4455 - DNA, 84 bp, synthetic construct
  source 1..84: mol_type = other DNA
tttttttaagcagtggtatcaacgcagagtacnnaacgtgtcnntacggaganntttttttttttttttttttttttttttttt

SEQ ID NO: 4456 - DNA, 84 bp, synthetic construct
  source 1..84: mol_type = other DNA
tttttttaagcagtggtatcaacgcagagtacnnaacgtgtcnncgacaaganntttttttttttttttttttttttttttttt

SEQ ID NO: 4457 - DNA, 84 bp, synthetic construct
  source 1..84: mol_type = other DNA
tttttttaagcagtggtatcaacgcagagtacnnaacgtgtcnncgaagtganntttttttttttttttttttttttttttttt

SEQ ID NO: 4458 - DNA, 84 bp, synthetic construct
  source 1..84: mol_type = other DNA
tttttttaagcagtggtatcaacgcagagtacnnaacgtgtcnnagctggtanntttttttttttttttttttttttttttttt

SEQ ID NO: 4459 - DNA, 84 bp, synthetic construct
  source 1..84: mol_type = other DNA
tttttttaagcagtggtatcaacgcagagtacnnaacgtgtcnnaactaggcnntttttttttttttttttttttttttttttt

SEQ ID NO: 4460 - DNA, 84 bp, synthetic construct
  source 1..84: mol_type = other DNA
tttttttaagcagtggtatcaacgcagagtacnnaacgtgtcnncagcaagtnntttttttttttttttttttttttttttttt

SEQ ID NO: 4461 - DNA, 84 bp, synthetic construct
  source 1..84: mol_type = other DNA
tttttttaagcagtggtatcaacgcagagtacnnaacgtgtcnnacgaggtanntttttttttttttttttttttttttttttt

SEQ ID NO: 4462 - DNA, 84 bp, synthetic construct
  source 1..84: mol_type = other DNA
tttttttaagcagtggtatcaacgcagagtacnnaacgtgtcnncatcttccnntttttttttttttttttttttttttttttt

SEQ ID NO: 4463 - DNA, 84 bp, synthetic construct
  source 1..84: mol_type = other DNA
tttttttaagcagtggtatcaacgcagagtacnnaacgtgtcnncctgaatcnntttttttttttttttttttttttttttttt

SEQ ID NO: 4464 - DNA, 84 bp, synthetic construct
  source 1..84: mol_type = other DNA
tttttttaagcagtggtatcaacgcagagtacnnaacgtgtcnntgcagactnntttttttttttttttttttttttttttttt

SEQ ID NO: 4465 - DNA, 84 bp, synthetic construct
  source 1..84: mol_type = other DNA
tttttttaagcagtggtatcaacgcagagtacnnaacgtgtcnnagatgtggnntttttttttttttttttttttttttttttt

SEQ ID NO: 4466 - DNA, 84 bp, synthetic construct
  source 1..84: mol_type = other DNA
tttttttaagcagtggtatcaacgcagagtacnnaacgtgtcnnagttcgacnntttttttttttttttttttttttttttttt

SEQ ID NO: 4467 - DNA, 84 bp, synthetic construct
  source 1..84: mol_type = other DNA
tttttttaagcagtggtatcaacgcagagtacnnaacgtgtcnnacaacctcnntttttttttttttttttttttttttttttt

SEQ ID NO: 4468 - DNA, 84 bp, synthetic construct
  source 1..84: mol_type = other DNA
tttttttaagcagtggtatcaacgcagagtacnnaacgtgtcnncatggtagnntttttttttttttttttttttttttttttt

SEQ ID NO: 4469 - DNA, 84 bp, synthetic construct
  source 1..84: mol_type = other DNA
tttttttaagcagtggtatcaacgcagagtacnnaacgtgtcnncgtatctcnntttttttttttttttttttttttttttttt

SEQ ID NO: 4470 - DNA, 84 bp, synthetic construct
  source 1..84: mol_type = other DNA
tttttttaagcagtggtatcaacgcagagtacnnaacgtgtcnncctagttcnntttttttttttttttttttttttttttttt

SEQ ID NO: 4471 - DNA, 84 bp, synthetic construct
  source 1..84: mol_type = other DNA
tttttttaagcagtggtatcaacgcagagtacnnaacgtgtcnncaagagtcnntttttttttttttttttttttttttttttt

SEQ ID NO: 4472 - DNA, 84 bp, synthetic construct
  source 1..84: mol_type = other DNA
tttttttaagcagtggtatcaacgcagagtacnnggtcagaannaatcggcanntttttttttttttttttttttttttttttt

SEQ ID NO: 4473 - DNA, 84 bp, synthetic construct
  source 1..84: mol_type = other DNA
tttttttaagcagtggtatcaacgcagagtacnnggtcagaanntacggcatnntttttttttttttttttttttttttttttt

SEQ ID NO: 4474 - DNA, 84 bp, synthetic construct
  source 1..84: mol_type = other DNA
tttttttaagcagtggtatcaacgcagagtacnnggtcagaannttggatcgnntttttttttttttttttttttttttttttt

SEQ ID NO: 4475 - DNA, 84 bp, synthetic construct
  source 1..84: mol_type = other DNA
tttttttaagcagtggtatcaacgcagagtacnnggtcagaanntggaacganntttttttttttttttttttttttttttttt

SEQ ID NO: 4476 - DNA, 84 bp, synthetic construct
  source 1..84: mol_type = other DNA
tttttttaagcagtggtatcaacgcagagtacnnggtcagaannggcaatcanntttttttttttttttttttttttttttttt

SEQ ID NO: 4477 - DNA, 84 bp, synthetic construct
  source 1..84: mol_type = other DNA
tttttttaagcagtggtatcaacgcagagtacnnggtcagaanngaatccganntttttttttttttttttttttttttttttt

SEQ ID NO: 4478 - DNA, 84 bp, synthetic construct
  source 1..84: mol_type = other DNA
tttttttaagcagtggtatcaacgcagagtacnnggtcagaannttacggtgnntttttttttttttttttttttttttttttt

SEQ ID NO: 4479 - DNA, 84 bp, synthetic construct
  source 1..84: mol_type = other DNA
tttttttaagcagtggtatcaacgcagagtacnnggtcagaanncatatcggnntttttttttttttttttttttttttttttt

SEQ ID NO: 4480 - DNA, 84 bp, synthetic construct
  source 1..84: mol_type = other DNA
tttttttaagcagtggtatcaacgcagagtacnnggtcagaanncttcggtanntttttttttttttttttttttttttttttt

SEQ ID NO: 4481 - DNA, 84 bp, synthetic construct
  source 1..84: mol_type = other DNA
tttttttaagcagtggtatcaacgcagagtacnnggtcagaanntcctaacgnntttttttttttttttttttttttttttttt

SEQ ID NO: 4482 - DNA, 84 bp, synthetic construct
  source 1..84: mol_type = other DNA
tttttttaagcagtggtatcaacgcagagtacnnggtcagaanngtaagccanntttttttttttttttttttttttttttttt

SEQ ID NO: 4483 - DNA, 84 bp, synthetic construct
  source 1..84: mol_type = other DNA
tttttttaagcagtggtatcaacgcagagtacnnggtcagaanntaaggtggnntttttttttttttttttttttttttttttt

SEQ ID NO: 4484 - DNA, 84 bp, synthetic construct
  source 1..84: mol_type = other DNA
tttttttaagcagtggtatcaacgcagagtacnnggtcagaannggtaagctnntttttttttttttttttttttttttttttt

SEQ ID NO: 4485 - DNA, 84 bp, synthetic construct
  source 1..84: mol_type = other DNA
tttttttaagcagtggtatcaacgcagagtacnnggtcagaanntgtgtcganntttttttttttttttttttttttttttttt

SEQ ID NO: 4486 - DNA, 84 bp, synthetic construct
  source 1..84: mol_type = other DNA
tttttttaagcagtggtatcaacgcagagtacnnggtcagaanngagcatganntttttttttttttttttttttttttttttt

SEQ ID NO: 4487 - DNA, 84 bp, synthetic construct
  source 1..84: mol_type = other DNA
tttttttaagcagtggtatcaacgcagagtacnnggtcagaanntcgaagtcnntttttttttttttttttttttttttttttt

SEQ ID NO: 4488 - DNA, 84 bp, synthetic construct
  source 1..84: mol_type = other DNA
tttttttaagcagtggtatcaacgcagagtacnnggtcagaannggtgaacanntttttttttttttttttttttttttttttt

SEQ ID NO: 4489 - DNA, 84 bp, synthetic construct
  source 1..84: mol_type = other DNA
tttttttaagcagtggtatcaacgcagagtacnnggtcagaannacatgcacnntttttttttttttttttttttttttttttt

SEQ ID NO: 4490 - DNA, 84 bp, synthetic construct
  source 1..84: mol_type = other DNA
tttttttaagcagtggtatcaacgcagagtacnnggtcagaannccaacagtnntttttttttttttttttttttttttttttt

SEQ ID NO: 4491 - DNA, 84 bp, synthetic construct
  source 1..84: mol_type = other DNA
tttttttaagcagtggtatcaacgcagagtacnnggtcagaannagaacagcnntttttttttttttttttttttttttttttt

SEQ ID NO: 4492 - DNA, 84 bp, synthetic construct
  source 1..84: mol_type = other DNA
tttttttaagcagtggtatcaacgcagagtacnnggtcagaanngaacacgtnntttttttttttttttttttttttttttttt

SEQ ID NO: 4493 - DNA, 84 bp, synthetic construct
  source 1..84: mol_type = other DNA
tttttttaagcagtggtatcaacgcagagtacnnggtcagaannggtcttcanntttttttttttttttttttttttttttttt

SEQ ID NO: 4494 - DNA, 84 bp, synthetic construct
  source 1..84: mol_type = other DNA
tttttttaagcagtggtatcaacgcagagtacnnggtcagaannaggttcagnntttttttttttttttttttttttttttttt

SEQ ID NO: 4495 - DNA, 84 bp, synthetic construct
  source 1..84: mol_type = other DNA
tttttttaagcagtggtatcaacgcagagtacnnggtcagaannctagagcanntttttttttttttttttttttttttttttt

SEQ ID NO: 4496 - DNA, 84 bp, synthetic construct
  source 1..84: mol_type = other DNA
tttttttaagcagtggtatcaacgcagagtacnnggtcagaanncttctagcnntttttttttttttttttttttttttttttt

SEQ ID NO: 4497 - DNA, 84 bp, synthetic construct
  source 1..84: mol_type = other DNA
tttttttaagcagtggtatcaacgcagagtacnnggtcagaanngagtaacgnntttttttttttttttttttttttttttttt

SEQ ID NO: 4498 - DNA, 84 bp, synthetic construct
  source 1..84: mol_type = other DNA
tttttttaagcagtggtatcaacgcagagtacnnggtcagaannctaagaggnntttttttttttttttttttttttttttttt

SEQ ID NO: 4499 - DNA, 84 bp, synthetic construct
  source 1..84: mol_type = other DNA
tttttttaagcagtggtatcaacgcagagtacnnggtcagaannacgtgtagnntttttttttttttttttttttttttttttt

SEQ ID NO: 4500 - DNA, 84 bp, synthetic construct
  source 1..84: mol_type = other DNA
tttttttaagcagtggtatcaacgcagagtacnnggtcagaannactacaggnntttttttttttttttttttttttttttttt

SEQ ID NO: 4501 - DNA, 84 bp, synthetic construct
  source 1..84: mol_type = other DNA
tttttttaagcagtggtatcaacgcagagtacnnggtcagaanntacaggtcnntttttttttttttttttttttttttttttt

SEQ ID NO: 4502 - DNA, 84 bp, synthetic construct
  source 1..84: mol_type = other DNA
tttttttaagcagtggtatcaacgcagagtacnnggtcagaannctcacatgnntttttttttttttttttttttttttttttt

SEQ ID NO: 4503 - DNA, 84 bp, synthetic construct
  source 1..84: mol_type = other DNA
tttttttaagcagtggtatcaacgcagagtacnnggtcagaannactaggagnntttttttttttttttttttttttttttttt

SEQ ID NO: 4504 - DNA, 84 bp, synthetic construct
  source 1..84: mol_type = other DNA
tttttttaagcagtggtatcaacgcagagtacnnggtcagaannccatagganntttttttttttttttttttttttttttttt

SEQ ID NO: 4505 - DNA, 84 bp, synthetic construct
  source 1..84: mol_type = other DNA
tttttttaagcagtggtatcaacgcagagtacnnggtcagaannggagaatcnntttttttttttttttttttttttttttttt

SEQ ID NO: 4506 - DNA, 84 bp, synthetic construct
  source 1..84: mol_type = other DNA
tttttttaagcagtggtatcaacgcagagtacnnggtcagaanngccaagaanntttttttttttttttttttttttttttttt

SEQ ID NO: 4507 - DNA, 84 bp, synthetic construct
  source 1..84: mol_type = other DNA
tttttttaagcagtggtatcaacgcagagtacnnggtcagaannaaggcaagnntttttttttttttttttttttttttttttt

SEQ ID NO: 4508 - DNA, 84 bp, synthetic construct
  source 1..84: mol_type = other DNA
tttttttaagcagtggtatcaacgcagagtacnnggtcagaannaatgtcgcnntttttttttttttttttttttttttttttt

SEQ ID NO: 4509 - DNA, 84 bp, synthetic construct
  source 1..84: mol_type = other DNA
tttttttaagcagtggtatcaacgcagagtacnnggtcagaannatggaaccnntttttttttttttttttttttttttttttt

SEQ ID NO: 4510 - DNA, 84 bp, synthetic construct
  source 1..84: mol_type = other DNA
tttttttaagcagtggtatcaacgcagagtacnnggtcagaannagaggcatnntttttttttttttttttttttttttttttt

SEQ ID NO: 4511 - DNA, 84 bp, synthetic construct
  source 1..84: mol_type = other DNA
tttttttaagcagtggtatcaacgcagagtacnnggtcagaanntgcatagcnntttttttttttttttttttttttttttttt

SEQ ID NO: 4512 - DNA, 84 bp, synthetic construct
  source 1..84: mol_type = other DNA
tttttttaagcagtggtatcaacgcagagtacnnggtcagaannctaacgganntttttttttttttttttttttttttttttt

SEQ ID NO: 4513 - DNA, 84 bp, synthetic construct
  source 1..84: mol_type = other DNA
tttttttaagcagtggtatcaacgcagagtacnnggtcagaanntatcgaggnntttttttttttttttttttttttttttttt

SEQ ID NO: 4514 - DNA, 84 bp, synthetic construct
  source 1..84: mol_type = other DNA
tttttttaagcagtggtatcaacgcagagtacnnggtcagaanncatagcctnntttttttttttttttttttttttttttttt

SEQ ID NO: 4515 - DNA, 84 bp, synthetic construct
  source 1..84: mol_type = other DNA
tttttttaagcagtggtatcaacgcagagtacnnggtcagaannatcgagacnntttttttttttttttttttttttttttttt

SEQ ID NO: 4516 - DNA, 84 bp, synthetic construct
  source 1..84: mol_type = other DNA
tttttttaagcagtggtatcaacgcagagtacnnggtcagaannggaagagtnntttttttttttttttttttttttttttttt

SEQ ID NO: 4517 - DNA, 84 bp, synthetic construct
  source 1..84: mol_type = other DNA
tttttttaagcagtggtatcaacgcagagtacnnggtcagaannccaagtagnntttttttttttttttttttttttttttttt

SEQ ID NO: 4518 - DNA, 84 bp, synthetic construct
  source 1..84: mol_type = other DNA
tttttttaagcagtggtatcaacgcagagtacnnggtcagaannctgaacagnntttttttttttttttttttttttttttttt

SEQ ID NO: 4519 - DNA, 84 bp, synthetic construct
  source 1..84: mol_type = other DNA
tttttttaagcagtggtatcaacgcagagtacnnggtcagaanngtaggttcnntttttttttttttttttttttttttttttt

SEQ ID NO: 4520 - DNA, 84 bp, synthetic construct
  source 1..84: mol_type = other DNA
tttttttaagcagtggtatcaacgcagagtacnnggtcagaanngtatggacnntttttttttttttttttttttttttttttt

SEQ ID NO: 4521 - DNA, 84 bp, synthetic construct
  source 1..84: mol_type = other DNA
tttttttaagcagtggtatcaacgcagagtacnnggtcagaanntcgcaacanntttttttttttttttttttttttttttttt

SEQ ID NO: 4522 - DNA, 84 bp, synthetic construct
  source 1..84: mol_type = other DNA
tttttttaagcagtggtatcaacgcagagtacnnggtcagaannccgctaatnntttttttttttttttttttttttttttttt

SEQ ID NO: 4523 - DNA, 84 bp, synthetic construct
  source 1..84: mol_type = other DNA
tttttttaagcagtggtatcaacgcagagtacnnggtcagaanngattcgcanntttttttttttttttttttttttttttttt

SEQ ID NO: 4524 - DNA, 84 bp, synthetic construct
  source 1..84: mol_type = other DNA
tttttttaagcagtggtatcaacgcagagtacnnggtcagaanncgatggaanntttttttttttttttttttttttttttttt

SEQ ID NO: 4525 - DNA, 84 bp, synthetic construct
  source 1..84: mol_type = other DNA
tttttttaagcagtggtatcaacgcagagtacnnggtcagaannagcaagganntttttttttttttttttttttttttttttt

SEQ ID NO: 4526 - DNA, 84 bp, synthetic construct
  source 1..84: mol_type = other DNA
tttttttaagcagtggtatcaacgcagagtacnnggtcagaanncgtagcaanntttttttttttttttttttttttttttttt

SEQ ID NO: 4527 - DNA, 84 bp, synthetic construct
  source 1..84: mol_type = other DNA
tttttttaagcagtggtatcaacgcagagtacnnggtcagaanntggcagtanntttttttttttttttttttttttttttttt

SEQ ID NO: 4528 - DNA, 84 bp, synthetic construct
  source 1..84: mol_type = other DNA
tttttttaagcagtggtatcaacgcagagtacnnggtcagaanncggtagttnntttttttttttttttttttttttttttttt

SEQ ID NO: 4529 - DNA, 84 bp, synthetic construct
  source 1..84: mol_type = other DNA
tttttttaagcagtggtatcaacgcagagtacnnggtcagaanntgacttcgnntttttttttttttttttttttttttttttt

SEQ ID NO: 4530 - DNA, 84 bp, synthetic construct
  source 1..84: mol_type = other DNA
tttttttaagcagtggtatcaacgcagagtacnnggtcagaanngagtgcaanntttttttttttttttttttttttttttttt

SEQ ID NO: 4531 - DNA, 84 bp, synthetic construct
  source 1..84: mol_type = other DNA
tttttttaagcagtggtatcaacgcagagtacnnggtcagaannacggtaacnntttttttttttttttttttttttttttttt

SEQ ID NO: 4532 - DNA, 84 bp, synthetic construct
  source 1..84: mol_type = other DNA
tttttttaagcagtggtatcaacgcagagtacnnggtcagaannaagtggtgnntttttttttttttttttttttttttttttt

SEQ ID NO: 4533 - DNA, 84 bp, synthetic construct
  source 1..84: mol_type = other DNA
tttttttaagcagtggtatcaacgcagagtacnnggtcagaannggagacaanntttttttttttttttttttttttttttttt

SEQ ID NO: 4534 - DNA, 84 bp, synthetic construct
  source 1..84: mol_type = other DNA
tttttttaagcagtggtatcaacgcagagtacnnggtcagaanntcaaggacnntttttttttttttttttttttttttttttt

SEQ ID NO: 4535 - DNA, 84 bp, synthetic construct
  source 1..84: mol_type = other DNA
tttttttaagcagtggtatcaacgcagagtacnnggtcagaannaagagagcnntttttttttttttttttttttttttttttt

SEQ ID NO: 4536 - DNA, 84 bp, synthetic construct
  source 1..84: mol_type = other DNA
tttttttaagcagtggtatcaacgcagagtacnnggtcagaanncgagagatnntttttttttttttttttttttttttttttt

SEQ ID NO: 4537 - DNA, 84 bp, synthetic construct
  source 1..84: mol_type = other DNA
tttttttaagcagtggtatcaacgcagagtacnnggtcagaannacagatggnntttttttttttttttttttttttttttttt

SEQ ID NO: 4538 - DNA, 84 bp, synthetic construct
  source 1..84: mol_type = other DNA
tttttttaagcagtggtatcaacgcagagtacnnggtcagaannaggagtcanntttttttttttttttttttttttttttttt

SEQ ID NO: 4539 - DNA, 84 bp, synthetic construct
  source 1..84: mol_type = other DNA
tttttttaagcagtggtatcaacgcagagtacnnggtcagaanncgtgttacnntttttttttttttttttttttttttttttt

SEQ ID NO: 4540 - DNA, 84 bp, synthetic construct
  source 1..84: mol_type = other DNA
tttttttaagcagtggtatcaacgcagagtacnnggtcagaanntagtgtgcnntttttttttttttttttttttttttttttt

SEQ ID NO: 4541 - DNA, 84 bp, synthetic construct
  source 1..84: mol_type = other DNA
tttttttaagcagtggtatcaacgcagagtacnnggtcagaannctcatgacnntttttttttttttttttttttttttttttt

SEQ ID NO: 4542 - DNA, 84 bp, synthetic construct
  source 1..84: mol_type = other DNA
tttttttaagcagtggtatcaacgcagagtacnnggtcagaanngtatccagnntttttttttttttttttttttttttttttt

SEQ ID NO: 4543 - DNA, 84 bp, synthetic construct
  source 1..84: mol_type = other DNA
tttttttaagcagtggtatcaacgcagagtacnnggtcagaannacgcctatnntttttttttttttttttttttttttttttt

SEQ ID NO: 4544 - DNA, 84 bp, synthetic construct
  source 1..84: mol_type = other DNA
tttttttaagcagtggtatcaacgcagagtacnnggtcagaannaacgacctnntttttttttttttttttttttttttttttt

SEQ ID NO: 4545 - DNA, 84 bp, synthetic construct
  source 1..84: mol_type = other DNA
tttttttaagcagtggtatcaacgcagagtacnnggtcagaannatcaggctnntttttttttttttttttttttttttttttt

SEQ ID NO: 4546 - DNA, 84 bp, synthetic construct
  source 1..84: mol_type = other DNA
tttttttaagcagtggtatcaacgcagagtacnnggtcagaanncaagttcgnntttttttttttttttttttttttttttttt

SEQ ID NO: 4547 - DNA, 84 bp, synthetic construct
  source 1..84: mol_type = other DNA
tttttttaagcagtggtatcaacgcagagtacnnggtcagaanntagccaganntttttttttttttttttttttttttttttt

SEQ ID NO: 4548 - DNA, 84 bp, synthetic construct
  source 1..84: mol_type = other DNA
tttttttaagcagtggtatcaacgcagagtacnnggtcagaanncaatcacgnntttttttttttttttttttttttttttttt

SEQ ID NO: 4549 - DNA, 84 bp, synthetic construct
  source 1..84: mol_type = other DNA
tttttttaagcagtggtatcaacgcagagtacnnggtcagaanngcaacaagnntttttttttttttttttttttttttttttt

SEQ ID NO: 4550 - DNA, 84 bp, synthetic construct
  source 1..84: mol_type = other DNA
tttttttaagcagtggtatcaacgcagagtacnnggtcagaanncacgacaanntttttttttttttttttttttttttttttt

SEQ ID NO: 4551 - DNA, 84 bp, synthetic construct
  source 1..84: mol_type = other DNA
tttttttaagcagtggtatcaacgcagagtacnnggtcagaanntacggaganntttttttttttttttttttttttttttttt

SEQ ID NO: 4552 - DNA, 84 bp, synthetic construct
  source 1..84: mol_type = other DNA
tttttttaagcagtggtatcaacgcagagtacnnggtcagaanncgacaaganntttttttttttttttttttttttttttttt

SEQ ID NO: 4553 - DNA, 84 bp, synthetic construct
  source 1..84: mol_type = other DNA
tttttttaagcagtggtatcaacgcagagtacnnggtcagaanncgaagtganntttttttttttttttttttttttttttttt

SEQ ID NO: 4554 - DNA, 84 bp, synthetic construct
  source 1..84: mol_type = other DNA
tttttttaagcagtggtatcaacgcagagtacnnggtcagaannagctggtanntttttttttttttttttttttttttttttt

SEQ ID NO: 4555 - DNA, 84 bp, synthetic construct
  source 1..84: mol_type = other DNA
tttttttaagcagtggtatcaacgcagagtacnnggtcagaannaactaggcnntttttttttttttttttttttttttttttt

SEQ ID NO: 4556 - DNA, 84 bp, synthetic construct
  source 1..84: mol_type = other DNA
tttttttaagcagtggtatcaacgcagagtacnnggtcagaanncagcaagtnntttttttttttttttttttttttttttttt

SEQ ID NO: 4557 - DNA, 84 bp, synthetic construct
  source 1..84: mol_type = other DNA
tttttttaagcagtggtatcaacgcagagtacnnggtcagaannacgaggtanntttttttttttttttttttttttttttttt

SEQ ID NO: 4558 - DNA, 84 bp, synthetic construct
  source 1..84: mol_type = other DNA
tttttttaagcagtggtatcaacgcagagtacnnggtcagaanncatcttccnntttttttttttttttttttttttttttttt

SEQ ID NO: 4559 - DNA, 84 bp, synthetic construct
  source 1..84: mol_type = other DNA
tttttttaagcagtggtatcaacgcagagtacnnggtcagaanncctgaatcnntttttttttttttttttttttttttttttt

SEQ ID NO: 4560 - DNA, 84 bp, synthetic construct
  source 1..84: mol_type = other DNA
tttttttaagcagtggtatcaacgcagagtacnnggtcagaanntgcagactnntttttttttttttttttttttttttttttt

SEQ ID NO: 4561 - DNA, 84 bp, synthetic construct
  source 1..84: mol_type = other DNA
tttttttaagcagtggtatcaacgcagagtacnnggtcagaannagatgtggnntttttttttttttttttttttttttttttt

SEQ ID NO: 4562 - DNA, 84 bp, synthetic construct
  source 1..84: mol_type = other DNA
tttttttaagcagtggtatcaacgcagagtacnnggtcagaannagttcgacnntttttttttttttttttttttttttttttt

SEQ ID NO: 4563 - DNA, 84 bp, synthetic construct
  source 1..84: mol_type = other DNA
tttttttaagcagtggtatcaacgcagagtacnnggtcagaannacaacctcnntttttttttttttttttttttttttttttt

SEQ ID NO: 4564 - DNA, 84 bp, synthetic construct
  source 1..84: mol_type = other DNA
tttttttaagcagtggtatcaacgcagagtacnnggtcagaanncatggtagnntttttttttttttttttttttttttttttt

SEQ ID NO: 4565 - DNA, 84 bp, synthetic construct
  source 1..84: mol_type = other DNA
tttttttaagcagtggtatcaacgcagagtacnnggtcagaanncgtatctcnntttttttttttttttttttttttttttttt

SEQ ID NO: 4566 - DNA, 84 bp, synthetic construct
  source 1..84: mol_type = other DNA
tttttttaagcagtggtatcaacgcagagtacnnggtcagaanncctagttcnntttttttttttttttttttttttttttttt

SEQ ID NO: 4567 - DNA, 84 bp, synthetic construct
  source 1..84: mol_type = other DNA
tttttttaagcagtggtatcaacgcagagtacnnggtcagaanncaagagtcnntttttttttttttttttttttttttttttt

SEQ ID NO: 4568 - DNA, 84 bp, synthetic construct
  source 1..84: mol_type = other DNA
tttttttaagcagtggtatcaacgcagagtacnngagtcgatnnaatcggcanntttttttttttttttttttttttttttttt

SEQ ID NO: 4569 - DNA, 84 bp, synthetic construct
  source 1..84: mol_type = other DNA
tttttttaagcagtggtatcaacgcagagtacnngagtcgatnntacggcatnntttttttttttttttttttttttttttttt

SEQ ID NO: 4570 - DNA, 84 bp, synthetic construct
  source 1..84: mol_type = other DNA
tttttttaagcagtggtatcaacgcagagtacnngagtcgatnnttggatcgnntttttttttttttttttttttttttttttt

SEQ ID NO: 4571 - DNA, 84 bp, synthetic construct
  source 1..84: mol_type = other DNA
tttttttaagcagtggtatcaacgcagagtacnngagtcgatnntggaacganntttttttttttttttttttttttttttttt

SEQ ID NO: 4572 - DNA, 84 bp, synthetic construct
  source 1..84: mol_type = other DNA
tttttttaagcagtggtatcaacgcagagtacnngagtcgatnnggcaatcanntttttttttttttttttttttttttttttt

SEQ ID NO: 4573 - DNA, 84 bp, synthetic construct
  source 1..84: mol_type = other DNA
tttttttaagcagtggtatcaacgcagagtacnngagtcgatnngaatccganntttttttttttttttttttttttttttttt

SEQ ID NO: 4574 - DNA, 84 bp, synthetic construct
  source 1..84: mol_type = other DNA
tttttttaagcagtggtatcaacgcagagtacnngagtcgatnnttacggtgnntttttttttttttttttttttttttttttt

SEQ ID NO: 4575 - DNA, 84 bp, synthetic construct
  source 1..84: mol_type = other DNA
tttttttaagcagtggtatcaacgcagagtacnngagtcgatnncatatcggnntttttttttttttttttttttttttttttt

SEQ ID NO: 4576 - DNA, 84 bp, synthetic construct
  source 1..84: mol_type = other DNA
tttttttaagcagtggtatcaacgcagagtacnngagtcgatnncttcggtanntttttttttttttttttttttttttttttt

SEQ ID NO: 4577 - DNA, 84 bp, synthetic construct
  source 1..84: mol_type = other DNA
tttttttaagcagtggtatcaacgcagagtacnngagtcgatnntcctaacgnntttttttttttttttttttttttttttttt

SEQ ID NO: 4578 - DNA, 84 bp, synthetic construct
  source 1..84: mol_type = other DNA
tttttttaagcagtggtatcaacgcagagtacnngagtcgatnngtaagccanntttttttttttttttttttttttttttttt

SEQ ID NO: 4579 - DNA, 84 bp, synthetic construct
  source 1..84: mol_type = other DNA
tttttttaagcagtggtatcaacgcagagtacnngagtcgatnntaaggtggnntttttttttttttttttttttttttttttt

SEQ ID NO: 4580 - DNA, 84 bp, synthetic construct
  source 1..84: mol_type = other DNA
tttttttaagcagtggtatcaacgcagagtacnngagtcgatnnggtaagctnntttttttttttttttttttttttttttttt

SEQ ID NO: 4581 - DNA, 84 bp, synthetic construct
  source 1..84: mol_type = other DNA
tttttttaagcagtggtatcaacgcagagtacnngagtcgatnntgtgtcganntttttttttttttttttttttttttttttt

SEQ ID NO: 4582 - DNA, 84 bp, synthetic construct
  source 1..84: mol_type = other DNA
tttttttaagcagtggtatcaacgcagagtacnngagtcgatnngagcatganntttttttttttttttttttttttttttttt

SEQ ID NO: 4583 - DNA, 84 bp, synthetic construct
  source 1..84: mol_type = other DNA
tttttttaagcagtggtatcaacgcagagtacnngagtcgatnntcgaagtcnntttttttttttttttttttttttttttttt

SEQ ID NO: 4584 - DNA, 84 bp, synthetic construct
  source 1..84: mol_type = other DNA
tttttttaagcagtggtatcaacgcagagtacnngagtcgatnnggtgaacanntttttttttttttttttttttttttttttt

SEQ ID NO: 4585 - DNA, 84 bp, synthetic construct
  source 1..84: mol_type = other DNA
tttttttaagcagtggtatcaacgcagagtacnngagtcgatnnacatgcacnntttttttttttttttttttttttttttttt

SEQ ID NO: 4586 - DNA, 84 bp, synthetic construct
  source 1..84: mol_type = other DNA
tttttttaagcagtggtatcaacgcagagtacnngagtcgatnnccaacagtnntttttttttttttttttttttttttttttt

SEQ ID NO: 4587 - DNA, 84 bp, synthetic construct
  source 1..84: mol_type = other DNA
tttttttaagcagtggtatcaacgcagagtacnngagtcgatnnagaacagcnntttttttttttttttttttttttttttttt

SEQ ID NO: 4588 - DNA, 84 bp, synthetic construct
  source 1..84: mol_type = other DNA
tttttttaagcagtggtatcaacgcagagtacnngagtcgatnngaacacgtnntttttttttttttttttttttttttttttt

SEQ ID NO: 4589 - DNA, 84 bp, synthetic construct
  source 1..84: mol_type = other DNA
tttttttaagcagtggtatcaacgcagagtacnngagtcgatnnggtcttcanntttttttttttttttttttttttttttttt

SEQ ID NO: 4590 - DNA, 84 bp, synthetic construct
  source 1..84: mol_type = other DNA
tttttttaagcagtggtatcaacgcagagtacnngagtcgatnnaggttcagnntttttttttttttttttttttttttttttt

SEQ ID NO: 4591 - DNA, 84 bp, synthetic construct
  source 1..84: mol_type = other DNA
tttttttaagcagtggtatcaacgcagagtacnngagtcgatnnctagagcanntttttttttttttttttttttttttttttt

SEQ ID NO: 4592 - DNA, 84 bp, synthetic construct
  source 1..84: mol_type = other DNA
tttttttaagcagtggtatcaacgcagagtacnngagtcgatnncttctagcnntttttttttttttttttttttttttttttt

SEQ ID NO: 4593 - DNA, 84 bp, synthetic construct
  source 1..84: mol_type = other DNA
tttttttaagcagtggtatcaacgcagagtacnngagtcgatnngagtaacgnntttttttttttttttttttttttttttttt

SEQ ID NO: 4594 - DNA, 84 bp, synthetic construct
  source 1..84: mol_type = other DNA
tttttttaagcagtggtatcaacgcagagtacnngagtcgatnnctaagaggnntttttttttttttttttttttttttttttt

SEQ ID NO: 4595 - DNA, 84 bp, synthetic construct
  source 1..84: mol_type = other DNA
tttttttaagcagtggtatcaacgcagagtacnngagtcgatnnacgtgtagnntttttttttttttttttttttttttttttt

SEQ ID NO: 4596 - DNA, 84 bp, synthetic construct
  source 1..84: mol_type = other DNA
tttttttaagcagtggtatcaacgcagagtacnngagtcgatnnactacaggnntttttttttttttttttttttttttttttt

SEQ ID NO: 4597 - DNA, 84 bp, synthetic construct
  source 1..84: mol_type = other DNA
tttttttaagcagtggtatcaacgcagagtacnngagtcgatnntacaggtcnntttttttttttttttttttttttttttttt

SEQ ID NO: 4598 - DNA, 84 bp, synthetic construct
  source 1..84: mol_type = other DNA
tttttttaagcagtggtatcaacgcagagtacnngagtcgatnnctcacatgnntttttttttttttttttttttttttttttt

SEQ ID NO: 4599 - DNA, 84 bp, synthetic construct
  source 1..84: mol_type = other DNA
tttttttaagcagtggtatcaacgcagagtacnngagtcgatnnactaggagnntttttttttttttttttttttttttttttt

SEQ ID NO: 4600 - DNA, 84 bp, synthetic construct
  source 1..84: mol_type = other DNA
tttttttaagcagtggtatcaacgcagagtacnngagtcgatnnccatagganntttttttttttttttttttttttttttttt

SEQ ID NO: 4601 - DNA, 84 bp, synthetic construct
  source 1..84: mol_type = other DNA
tttttttaagcagtggtatcaacgcagagtacnngagtcgatnnggagaatcnntttttttttttttttttttttttttttttt

SEQ ID NO: 4602 - DNA, 84 bp, synthetic construct
  source 1..84: mol_type = other DNA
tttttttaagcagtggtatcaacgcagagtacnngagtcgatnngccaagaanntttttttttttttttttttttttttttttt

SEQ ID NO: 4603 - DNA, 84 bp, synthetic construct
  source 1..84: mol_type = other DNA
tttttttaagcagtggtatcaacgcagagtacnngagtcgatnnaaggcaagnntttttttttttttttttttttttttttttt

SEQ ID NO: 4604 - DNA, 84 bp, synthetic construct
  source 1..84: mol_type = other DNA
tttttttaagcagtggtatcaacgcagagtacnngagtcgatnnaatgtcgcnntttttttttttttttttttttttttttttt

SEQ ID NO: 4605 - DNA, 84 bp, synthetic construct
  source 1..84: mol_type = other DNA
tttttttaagcagtggtatcaacgcagagtacnngagtcgatnnatggaaccnntttttttttttttttttttttttttttttt

SEQ ID NO: 4606 - DNA, 84 bp, synthetic construct
  source 1..84: mol_type = other DNA
tttttttaagcagtggtatcaacgcagagtacnngagtcgatnnagaggcatnntttttttttttttttttttttttttttttt

SEQ ID NO: 4607 - DNA, 84 bp, synthetic construct
  source 1..84: mol_type = other DNA
tttttttaagcagtggtatcaacgcagagtacnngagtcgatnntgcatagcnntttttttttttttttttttttttttttttt

SEQ ID NO: 4608 - DNA, 84 bp, synthetic construct
  source 1..84: mol_type = other DNA
tttttttaagcagtggtatcaacgcagagtacnngagtcgatnnctaacgganntttttttttttttttttttttttttttttt

SEQ ID NO: 4609 - DNA, 84 bp, synthetic construct
  source 1..84: mol_type = other DNA
tttttttaagcagtggtatcaacgcagagtacnngagtcgatnntatcgaggnntttttttttttttttttttttttttttttt

SEQ ID NO: 4610 - DNA, 84 bp, synthetic construct
  source 1..84: mol_type = other DNA
tttttttaagcagtggtatcaacgcagagtacnngagtcgatnncatagcctnntttttttttttttttttttttttttttttt

SEQ ID NO: 4611 - DNA, 84 bp, synthetic construct
  source 1..84: mol_type = other DNA
tttttttaagcagtggtatcaacgcagagtacnngagtcgatnnatcgagacnntttttttttttttttttttttttttttttt

SEQ ID NO: 4612 - DNA, 84 bp, synthetic construct
  source 1..84: mol_type = other DNA
tttttttaagcagtggtatcaacgcagagtacnngagtcgatnnggaagagtnntttttttttttttttttttttttttttttt

SEQ ID NO: 4613 - DNA, 84 bp, synthetic construct
  source 1..84: mol_type = other DNA
tttttttaagcagtggtatcaacgcagagtacnngagtcgatnnccaagtagnntttttttttttttttttttttttttttttt

SEQ ID NO: 4614 - DNA, 84 bp, synthetic construct
  source 1..84: mol_type = other DNA
tttttttaagcagtggtatcaacgcagagtacnngagtcgatnnctgaacagnntttttttttttttttttttttttttttttt

SEQ ID NO: 4615 - DNA, 84 bp, synthetic construct
  source 1..84: mol_type = other DNA
tttttttaagcagtggtatcaacgcagagtacnngagtcgatnngtaggttcnntttttttttttttttttttttttttttttt

SEQ ID NO: 4616 - DNA, 84 bp, synthetic construct
  source 1..84: mol_type = other DNA
tttttttaagcagtggtatcaacgcagagtacnngagtcgatnngtatggacnntttttttttttttttttttttttttttttt

SEQ ID NO: 4617 - DNA, 84 bp, synthetic construct
  source 1..84: mol_type = other DNA
tttttttaagcagtggtatcaacgcagagtacnngagtcgatnntcgcaacanntttttttttttttttttttttttttttttt

SEQ ID NO: 4618 - DNA, 84 bp, synthetic construct
  source 1..84: mol_type = other DNA
tttttttaagcagtggtatcaacgcagagtacnngagtcgatnnccgctaatnntttttttttttttttttttttttttttttt

SEQ ID NO: 4619 - DNA, 84 bp, synthetic construct
  source 1..84: mol_type = other DNA
tttttttaagcagtggtatcaacgcagagtacnngagtcgatnngattcgcanntttttttttttttttttttttttttttttt

SEQ ID NO: 4620 - DNA, 84 bp, synthetic construct
  source 1..84: mol_type = other DNA
tttttttaagcagtggtatcaacgcagagtacnngagtcgatnncgatggaanntttttttttttttttttttttttttttttt

SEQ ID NO: 4621 - DNA, 84 bp, synthetic construct
  source 1..84: mol_type = other DNA
tttttttaagcagtggtatcaacgcagagtacnngagtcgatnnagcaagganntttttttttttttttttttttttttttttt

SEQ ID NO: 4622 - DNA, 84 bp, synthetic construct
  source 1..84: mol_type = other DNA
tttttttaagcagtggtatcaacgcagagtacnngagtcgatnncgtagcaanntttttttttttttttttttttttttttttt

SEQ ID NO: 4623 - DNA, 84 bp, synthetic construct
  source 1..84: mol_type = other DNA
tttttttaagcagtggtatcaacgcagagtacnngagtcgatnntggcagtanntttttttttttttttttttttttttttttt

SEQ ID NO: 4624 - DNA, 84 bp, synthetic construct
  source 1..84: mol_type = other DNA
tttttttaagcagtggtatcaacgcagagtacnngagtcgatnncggtagttnntttttttttttttttttttttttttttttt

SEQ ID NO: 4625 - DNA, 84 bp, synthetic construct
  source 1..84: mol_type = other DNA
tttttttaagcagtggtatcaacgcagagtacnngagtcgatnntgacttcgnntttttttttttttttttttttttttttttt

SEQ ID NO: 4626 - DNA, 84 bp, synthetic construct
  source 1..84: mol_type = other DNA
tttttttaagcagtggtatcaacgcagagtacnngagtcgatnngagtgcaanntttttttttttttttttttttttttttttt

SEQ ID NO: 4627 - DNA, 84 bp, synthetic construct
  source 1..84: mol_type = other DNA
tttttttaagcagtggtatcaacgcagagtacnngagtcgatnnacggtaacnntttttttttttttttttttttttttttttt

SEQ ID NO: 4628 - DNA, 84 bp, synthetic construct
  source 1..84: mol_type = other DNA
tttttttaagcagtggtatcaacgcagagtacnngagtcgatnnaagtggtgnntttttttttttttttttttttttttttttt

SEQ ID NO: 4629 - DNA, 84 bp, synthetic construct
  source 1..84: mol_type = other DNA
tttttttaagcagtggtatcaacgcagagtacnngagtcgatnnggagacaanntttttttttttttttttttttttttttttt

SEQ ID NO: 4630 - DNA, 84 bp, synthetic construct
  source 1..84: mol_type = other DNA
tttttttaagcagtggtatcaacgcagagtacnngagtcgatnntcaaggacnntttttttttttttttttttttttttttttt

SEQ ID NO: 4631 - DNA, 84 bp, synthetic construct
  source 1..84: mol_type = other DNA
tttttttaagcagtggtatcaacgcagagtacnngagtcgatnnaagagagcnntttttttttttttttttttttttttttttt

SEQ ID NO: 4632 - DNA, 84 bp, synthetic construct
  source 1..84: mol_type = other DNA
tttttttaagcagtggtatcaacgcagagtacnngagtcgatnncgagagatnntttttttttttttttttttttttttttttt

SEQ ID NO: 4633 - DNA, 84 bp, synthetic construct
  source 1..84: mol_type = other DNA
tttttttaagcagtggtatcaacgcagagtacnngagtcgatnnacagatggnntttttttttttttttttttttttttttttt

SEQ ID NO: 4634 - DNA, 84 bp, synthetic construct
  source 1..84: mol_type = other DNA
tttttttaagcagtggtatcaacgcagagtacnngagtcgatnnaggagtcanntttttttttttttttttttttttttttttt

SEQ ID NO: 4635 - DNA, 84 bp, synthetic construct
  source 1..84: mol_type = other DNA
tttttttaagcagtggtatcaacgcagagtacnngagtcgatnncgtgttacnntttttttttttttttttttttttttttttt

SEQ ID NO: 4636 - DNA, 84 bp, synthetic construct
  source 1..84: mol_type = other DNA
tttttttaagcagtggtatcaacgcagagtacnngagtcgatnntagtgtgcnntttttttttttttttttttttttttttttt

SEQ ID NO: 4637 - DNA, 84 bp, synthetic construct
  source 1..84: mol_type = other DNA
tttttttaagcagtggtatcaacgcagagtacnngagtcgatnnctcatgacnntttttttttttttttttttttttttttttt

SEQ ID NO: 4638 - DNA, 84 bp, synthetic construct
  source 1..84: mol_type = other DNA
tttttttaagcagtggtatcaacgcagagtacnngagtcgatnngtatccagnntttttttttttttttttttttttttttttt

SEQ ID NO: 4639 - DNA, 84 bp, synthetic construct
  source 1..84: mol_type = other DNA
tttttttaagcagtggtatcaacgcagagtacnngagtcgatnnacgcctatnntttttttttttttttttttttttttttttt

SEQ ID NO: 4640 - DNA, 84 bp, synthetic construct
  source 1..84: mol_type = other DNA
tttttttaagcagtggtatcaacgcagagtacnngagtcgatnnaacgacctnntttttttttttttttttttttttttttttt

SEQ ID NO: 4641 - DNA, 84 bp, synthetic construct
  source 1..84: mol_type = other DNA
tttttttaagcagtggtatcaacgcagagtacnngagtcgatnnatcaggctnntttttttttttttttttttttttttttttt

SEQ ID NO: 4642 - DNA, 84 bp, synthetic construct
  source 1..84: mol_type = other DNA
tttttttaagcagtggtatcaacgcagagtacnngagtcgatnncaagttcgnntttttttttttttttttttttttttttttt

SEQ ID NO: 4643 - DNA, 84 bp, synthetic construct
  source 1..84: mol_type = other DNA
tttttttaagcagtggtatcaacgcagagtacnngagtcgatnntagccaganntttttttttttttttttttttttttttttt

SEQ ID NO: 4644 - DNA, 84 bp, synthetic construct
  source 1..84: mol_type = other DNA
tttttttaagcagtggtatcaacgcagagtacnngagtcgatnncaatcacgnntttttttttttttttttttttttttttttt

SEQ ID NO: 4645 - DNA, 84 bp, synthetic construct
  source 1..84: mol_type = other DNA
tttttttaagcagtggtatcaacgcagagtacnngagtcgatnngcaacaagnntttttttttttttttttttttttttttttt

SEQ ID NO: 4646 - DNA, 84 bp, synthetic construct
  source 1..84: mol_type = other DNA
tttttttaagcagtggtatcaacgcagagtacnngagtcgatnncacgacaanntttttttttttttttttttttttttttttt

SEQ ID NO: 4647 - DNA, 84 bp, synthetic construct
  source 1..84: mol_type = other DNA
tttttttaagcagtggtatcaacgcagagtacnngagtcgatnntacggaganntttttttttttttttttttttttttttttt

SEQ ID NO: 4648 - DNA, 84 bp, synthetic construct
  source 1..84: mol_type = other DNA
tttttttaagcagtggtatcaacgcagagtacnngagtcgatnncgacaaganntttttttttttttttttttttttttttttt

SEQ ID NO: 4649 - DNA, 84 bp, synthetic construct
  source 1..84: mol_type = other DNA
tttttttaagcagtggtatcaacgcagagtacnngagtcgatnncgaagtganntttttttttttttttttttttttttttttt

SEQ ID NO: 4650 - DNA, 84 bp, synthetic construct
  source 1..84: mol_type = other DNA
tttttttaagcagtggtatcaacgcagagtacnngagtcgatnnagctggtanntttttttttttttttttttttttttttttt

SEQ ID NO: 4651 - DNA, 84 bp, synthetic construct
  source 1..84: mol_type = other DNA
tttttttaagcagtggtatcaacgcagagtacnngagtcgatnnaactaggcnntttttttttttttttttttttttttttttt

SEQ ID NO: 4652 - DNA, 84 bp, synthetic construct
  source 1..84: mol_type = other DNA
tttttttaagcagtggtatcaacgcagagtacnngagtcgatnncagcaagtnntttttttttttttttttttttttttttttt

SEQ ID NO: 4653 - DNA, 84 bp, synthetic construct
  source 1..84: mol_type = other DNA
tttttttaagcagtggtatcaacgcagagtacnngagtcgatnnacgaggtanntttttttttttttttttttttttttttttt

SEQ ID NO: 4654 - DNA, 84 bp, synthetic construct
  source 1..84: mol_type = other DNA
tttttttaagcagtggtatcaacgcagagtacnngagtcgatnncatcttccnntttttttttttttttttttttttttttttt

SEQ ID NO: 4655 - DNA, 84 bp, synthetic construct
  source 1..84: mol_type = other DNA
tttttttaagcagtggtatcaacgcagagtacnngagtcgatnncctgaatcnntttttttttttttttttttttttttttttt

SEQ ID NO: 4656 - DNA, 84 bp, synthetic construct
  source 1..84: mol_type = other DNA
tttttttaagcagtggtatcaacgcagagtacnngagtcgatnntgcagactnntttttttttttttttttttttttttttttt

SEQ ID NO: 4657 - DNA, 84 bp, synthetic construct
  source 1..84: mol_type = other DNA
tttttttaagcagtggtatcaacgcagagtacnngagtcgatnnagatgtggnntttttttttttttttttttttttttttttt

SEQ ID NO: 4658 - DNA, 84 bp, synthetic construct
  source 1..84: mol_type = other DNA
tttttttaagcagtggtatcaacgcagagtacnngagtcgatnnagttcgacnntttttttttttttttttttttttttttttt

SEQ ID NO: 4659 - DNA, 84 bp, synthetic construct
  source 1..84: mol_type = other DNA
tttttttaagcagtggtatcaacgcagagtacnngagtcgatnnacaacctcnntttttttttttttttttttttttttttttt

SEQ ID NO: 4660 - DNA, 84 bp, synthetic construct
  source 1..84: mol_type = other DNA
tttttttaagcagtggtatcaacgcagagtacnngagtcgatnncatggtagnntttttttttttttttttttttttttttttt

SEQ ID NO: 4661 - DNA, 84 bp, synthetic construct
  source 1..84: mol_type = other DNA
tttttttaagcagtggtatcaacgcagagtacnngagtcgatnncgtatctcnntttttttttttttttttttttttttttttt

SEQ ID NO: 4662 - DNA, 84 bp, synthetic construct
  source 1..84: mol_type = other DNA
tttttttaagcagtggtatcaacgcagagtacnngagtcgatnncctagttcnntttttttttttttttttttttttttttttt

SEQ ID NO: 4663 - DNA, 84 bp, synthetic construct
  source 1..84: mol_type = other DNA
tttttttaagcagtggtatcaacgcagagtacnngagtcgatnncaagagtcnntttttttttttttttttttttttttttttt

SEQ ID NO: 4664 - DNA, 84 bp, synthetic construct
  source 1..84: mol_type = other DNA
tttttttaagcagtggtatcaacgcagagtacnngatggtgtnnaatcggcanntttttttttttttttttttttttttttttt

SEQ ID NO: 4665 - DNA, 84 bp, synthetic construct
  source 1..84: mol_type = other DNA
tttttttaagcagtggtatcaacgcagagtacnngatggtgtnntacggcatnntttttttttttttttttttttttttttttt

SEQ ID NO: 4666 - DNA, 84 bp, synthetic construct
  source 1..84: mol_type = other DNA
tttttttaagcagtggtatcaacgcagagtacnngatggtgtnnttggatcgnntttttttttttttttttttttttttttttt

SEQ ID NO: 4667 - DNA, 84 bp, synthetic construct
  source 1..84: mol_type = other DNA
tttttttaagcagtggtatcaacgcagagtacnngatggtgtnntggaacganntttttttttttttttttttttttttttttt

SEQ ID NO: 4668 - DNA, 84 bp, synthetic construct
  source 1..84: mol_type = other DNA
tttttttaagcagtggtatcaacgcagagtacnngatggtgtnnggcaatcanntttttttttttttttttttttttttttttt

SEQ ID NO: 4669 - DNA, 84 bp, synthetic construct
  source 1..84: mol_type = other DNA
tttttttaagcagtggtatcaacgcagagtacnngatggtgtnngaatccganntttttttttttttttttttttttttttttt

SEQ ID NO: 4670 - DNA, 84 bp, synthetic construct
  source 1..84: mol_type = other DNA
tttttttaagcagtggtatcaacgcagagtacnngatggtgtnnttacggtgnntttttttttttttttttttttttttttttt

SEQ ID NO: 4671 - DNA, 84 bp, synthetic construct
  source 1..84: mol_type = other DNA
tttttttaagcagtggtatcaacgcagagtacnngatggtgtnncatatcggnntttttttttttttttttttttttttttttt

SEQ ID NO: 4672 - DNA, 84 bp, synthetic construct
  source 1..84: mol_type = other DNA
tttttttaagcagtggtatcaacgcagagtacnngatggtgtnncttcggtanntttttttttttttttttttttttttttttt

SEQ ID NO: 4673 - DNA, 84 bp, synthetic construct
  source 1..84: mol_type = other DNA
tttttttaagcagtggtatcaacgcagagtacnngatggtgtnntcctaacgnntttttttttttttttttttttttttttttt

SEQ ID NO: 4674 - DNA, 84 bp, synthetic construct
  source 1..84: mol_type = other DNA
tttttttaagcagtggtatcaacgcagagtacnngatggtgtnngtaagccanntttttttttttttttttttttttttttttt

SEQ ID NO: 4675 - DNA, 84 bp, synthetic construct
  source 1..84: mol_type = other DNA
tttttttaagcagtggtatcaacgcagagtacnngatggtgtnntaaggtggnntttttttttttttttttttttttttttttt

SEQ ID NO: 4676 - DNA, 84 bp, synthetic construct
  source 1..84: mol_type = other DNA
tttttttaagcagtggtatcaacgcagagtacnngatggtgtnnggtaagctnntttttttttttttttttttttttttttttt

SEQ ID NO: 4677 - DNA, 84 bp, synthetic construct
  source 1..84: mol_type = other DNA
tttttttaagcagtggtatcaacgcagagtacnngatggtgtnntgtgtcganntttttttttttttttttttttttttttttt

SEQ ID NO: 4678 - DNA, 84 bp, synthetic construct
  source 1..84: mol_type = other DNA
tttttttaagcagtggtatcaacgcagagtacnngatggtgtnngagcatganntttttttttttttttttttttttttttttt

SEQ ID NO: 4679 - DNA, 84 bp, synthetic construct
  source 1..84: mol_type = other DNA
tttttttaagcagtggtatcaacgcagagtacnngatggtgtnntcgaagtcnntttttttttttttttttttttttttttttt

SEQ ID NO: 4680 - DNA, 84 bp, synthetic construct
  source 1..84: mol_type = other DNA
tttttttaagcagtggtatcaacgcagagtacnngatggtgtnnggtgaacanntttttttttttttttttttttttttttttt

SEQ ID NO: 4681 - DNA, 84 bp, synthetic construct
  source 1..84: mol_type = other DNA
tttttttaagcagtggtatcaacgcagagtacnngatggtgtnnacatgcacnntttttttttttttttttttttttttttttt

SEQ ID NO: 4682 - DNA, 84 bp, synthetic construct
  source 1..84: mol_type = other DNA
tttttttaagcagtggtatcaacgcagagtacnngatggtgtnnccaacagtnntttttttttttttttttttttttttttttt

SEQ ID NO: 4683 - DNA, 84 bp, synthetic construct
  source 1..84: mol_type = other DNA
tttttttaagcagtggtatcaacgcagagtacnngatggtgtnnagaacagcnntttttttttttttttttttttttttttttt

SEQ ID NO: 4684 - DNA, 84 bp, synthetic construct
  source 1..84: mol_type = other DNA
tttttttaagcagtggtatcaacgcagagtacnngatggtgtnngaacacgtnntttttttttttttttttttttttttttttt

SEQ ID NO: 4685 - DNA, 84 bp, synthetic construct
  source 1..84: mol_type = other DNA
tttttttaagcagtggtatcaacgcagagtacnngatggtgtnnggtcttcanntttttttttttttttttttttttttttttt

SEQ ID NO: 4686 - DNA, 84 bp, synthetic construct
  source 1..84: mol_type = other DNA
tttttttaagcagtggtatcaacgcagagtacnngatggtgtnnaggttcagnntttttttttttttttttttttttttttttt

SEQ ID NO: 4687 - DNA, 84 bp, synthetic construct
  source 1..84: mol_type = other DNA
tttttttaagcagtggtatcaacgcagagtacnngatggtgtnnctagagcanntttttttttttttttttttttttttttttt

SEQ ID NO: 4688 - DNA, 84 bp, synthetic construct
  source 1..84: mol_type = other DNA
tttttttaagcagtggtatcaacgcagagtacnngatggtgtnncttctagcnntttttttttttttttttttttttttttttt

SEQ ID NO: 4689 - DNA, 84 bp, synthetic construct
  source 1..84: mol_type = other DNA
tttttttaagcagtggtatcaacgcagagtacnngatggtgtnngagtaacgnntttttttttttttttttttttttttttttt

SEQ ID NO: 4690 - DNA, 84 bp, synthetic construct
  source 1..84: mol_type = other DNA
tttttttaagcagtggtatcaacgcagagtacnngatggtgtnnctaagaggnntttttttttttttttttttttttttttttt

SEQ ID NO: 4691 - DNA, 84 bp, synthetic construct
  source 1..84: mol_type = other DNA
tttttttaagcagtggtatcaacgcagagtacnngatggtgtnnacgtgtagnntttttttttttttttttttttttttttttt

SEQ ID NO: 4692 - DNA, 84 bp, synthetic construct
  source 1..84: mol_type = other DNA
tttttttaagcagtggtatcaacgcagagtacnngatggtgtnnactacaggnntttttttttttttttttttttttttttttt

SEQ ID NO: 4693 - DNA, 84 bp, synthetic construct
  source 1..84: mol_type = other DNA
tttttttaagcagtggtatcaacgcagagtacnngatggtgtnntacaggtcnntttttttttttttttttttttttttttttt

SEQ ID NO: 4694 - DNA, 84 bp, synthetic construct
  source 1..84: mol_type = other DNA
tttttttaagcagtggtatcaacgcagagtacnngatggtgtnnctcacatgnntttttttttttttttttttttttttttttt

SEQ ID NO: 4695 - DNA, 84 bp, synthetic construct
  source 1..84: mol_type = other DNA
tttttttaagcagtggtatcaacgcagagtacnngatggtgtnnactaggagnntttttttttttttttttttttttttttttt

SEQ ID NO: 4696 - DNA, 84 bp, synthetic construct
  source 1..84: mol_type = other DNA
tttttttaagcagtggtatcaacgcagagtacnngatggtgtnnccatagganntttttttttttttttttttttttttttttt

SEQ ID NO: 4697 - DNA, 84 bp, synthetic construct
  source 1..84: mol_type = other DNA
tttttttaagcagtggtatcaacgcagagtacnngatggtgtnnggagaatcnntttttttttttttttttttttttttttttt

SEQ ID NO: 4698 - DNA, 84 bp, synthetic construct
  source 1..84: mol_type = other DNA
tttttttaagcagtggtatcaacgcagagtacnngatggtgtnngccaagaanntttttttttttttttttttttttttttttt

SEQ ID NO: 4699 - DNA, 84 bp, synthetic construct
  source 1..84: mol_type = other DNA
tttttttaagcagtggtatcaacgcagagtacnngatggtgtnnaaggcaagnntttttttttttttttttttttttttttttt

SEQ ID NO: 4700 - DNA, 84 bp, synthetic construct
  source 1..84: mol_type = other DNA
tttttttaagcagtggtatcaacgcagagtacnngatggtgtnnaatgtcgcnntttttttttttttttttttttttttttttt

SEQ ID NO: 4701 - DNA, 84 bp, synthetic construct
  source 1..84: mol_type = other DNA
tttttttaagcagtggtatcaacgcagagtacnngatggtgtnnatggaaccnntttttttttttttttttttttttttttttt

SEQ ID NO: 4702 - DNA, 84 bp, synthetic construct
  source 1..84: mol_type = other DNA
tttttttaagcagtggtatcaacgcagagtacnngatggtgtnnagaggcatnntttttttttttttttttttttttttttttt

SEQ ID NO: 4703 - DNA, 84 bp, synthetic construct
  source 1..84: mol_type = other DNA
tttttttaagcagtggtatcaacgcagagtacnngatggtgtnntgcatagcnntttttttttttttttttttttttttttttt

SEQ ID NO: 4704 - DNA, 84 bp, synthetic construct
  source 1..84: mol_type = other DNA
tttttttaagcagtggtatcaacgcagagtacnngatggtgtnnctaacgganntttttttttttttttttttttttttttttt

SEQ ID NO: 4705 - DNA, 84 bp, synthetic construct
  source 1..84: mol_type = other DNA
tttttttaagcagtggtatcaacgcagagtacnngatggtgtnntatcgaggnntttttttttttttttttttttttttttttt

SEQ ID NO: 4706 - DNA, 84 bp, synthetic construct
  source 1..84: mol_type = other DNA
tttttttaagcagtggtatcaacgcagagtacnngatggtgtnncatagcctnntttttttttttttttttttttttttttttt

SEQ ID NO: 4707 - DNA, 84 bp, synthetic construct
  source 1..84: mol_type = other DNA
tttttttaagcagtggtatcaacgcagagtacnngatggtgtnnatcgagacnntttttttttttttttttttttttttttttt

SEQ ID NO: 4708 - DNA, 84 bp, synthetic construct
  source 1..84: mol_type = other DNA
tttttttaagcagtggtatcaacgcagagtacnngatggtgtnnggaagagtnntttttttttttttttttttttttttttttt

SEQ ID NO: 4709 - DNA, 84 bp, synthetic construct
  source 1..84: mol_type = other DNA
tttttttaagcagtggtatcaacgcagagtacnngatggtgtnnccaagtagnntttttttttttttttttttttttttttttt

SEQ ID NO: 4710 - DNA, 84 bp, synthetic construct
  source 1..84: mol_type = other DNA
tttttttaagcagtggtatcaacgcagagtacnngatggtgtnnctgaacagnntttttttttttttttttttttttttttttt

SEQ ID NO: 4711 - DNA, 84 bp, synthetic construct
  source 1..84: mol_type = other DNA
tttttttaagcagtggtatcaacgcagagtacnngatggtgtnngtaggttcnntttttttttttttttttttttttttttttt

SEQ ID NO: 4712 - DNA, 84 bp, synthetic construct
  source 1..84: mol_type = other DNA
tttttttaagcagtggtatcaacgcagagtacnngatggtgtnngtatggacnntttttttttttttttttttttttttttttt

SEQ ID NO: 4713 - DNA, 84 bp, synthetic construct
  source 1..84: mol_type = other DNA
tttttttaagcagtggtatcaacgcagagtacnngatggtgtnntcgcaacanntttttttttttttttttttttttttttttt

SEQ ID NO: 4714 - DNA, 84 bp, synthetic construct
  source 1..84: mol_type = other DNA
tttttttaagcagtggtatcaacgcagagtacnngatggtgtnnccgctaatnntttttttttttttttttttttttttttttt

SEQ ID NO: 4715 - DNA, 84 bp, synthetic construct
  source 1..84: mol_type = other DNA
tttttttaagcagtggtatcaacgcagagtacnngatggtgtnngattcgcanntttttttttttttttttttttttttttttt

SEQ ID NO: 4716 - DNA, 84 bp, synthetic construct
  source 1..84: mol_type = other DNA
tttttttaagcagtggtatcaacgcagagtacnngatggtgtnncgatggaanntttttttttttttttttttttttttttttt

SEQ ID NO: 4717 - DNA, 84 bp, synthetic construct
  source 1..84: mol_type = other DNA
tttttttaagcagtggtatcaacgcagagtacnngatggtgtnnagcaagganntttttttttttttttttttttttttttttt

SEQ ID NO: 4718 - DNA, 84 bp, synthetic construct
  source 1..84: mol_type = other DNA
tttttttaagcagtggtatcaacgcagagtacnngatggtgtnncgtagcaanntttttttttttttttttttttttttttttt

SEQ ID NO: 4719 - DNA, 84 bp, synthetic construct
  source 1..84: mol_type = other DNA
tttttttaagcagtggtatcaacgcagagtacnngatggtgtnntggcagtanntttttttttttttttttttttttttttttt

SEQ ID NO: 4720 - DNA, 84 bp, synthetic construct
  source 1..84: mol_type = other DNA
tttttttaagcagtggtatcaacgcagagtacnngatggtgtnncggtagttnntttttttttttttttttttttttttttttt

SEQ ID NO: 4721 - DNA, 84 bp, synthetic construct
  source 1..84: mol_type = other DNA
tttttttaagcagtggtatcaacgcagagtacnngatggtgtnntgacttcgnntttttttttttttttttttttttttttttt

SEQ ID NO: 4722 - DNA, 84 bp, synthetic construct
  source 1..84: mol_type = other DNA
tttttttaagcagtggtatcaacgcagagtacnngatggtgtnngagtgcaanntttttttttttttttttttttttttttttt

SEQ ID NO: 4723 - DNA, 84 bp, synthetic construct
  source 1..84: mol_type = other DNA
tttttttaagcagtggtatcaacgcagagtacnngatggtgtnnacggtaacnntttttttttttttttttttttttttttttt

SEQ ID NO: 4724 - DNA, 84 bp, synthetic construct
  source 1..84: mol_type = other DNA
tttttttaagcagtggtatcaacgcagagtacnngatggtgtnnaagtggtgnntttttttttttttttttttttttttttttt

SEQ ID NO: 4725 - DNA, 84 bp, synthetic construct
  source 1..84: mol_type = other DNA
tttttttaagcagtggtatcaacgcagagtacnngatggtgtnnggagacaanntttttttttttttttttttttttttttttt

SEQ ID NO: 4726 - DNA, 84 bp, synthetic construct
  source 1..84: mol_type = other DNA
tttttttaagcagtggtatcaacgcagagtacnngatggtgtnntcaaggacnntttttttttttttttttttttttttttttt

SEQ ID NO: 4727 - DNA, 84 bp, synthetic construct
  source 1..84: mol_type = other DNA
tttttttaagcagtggtatcaacgcagagtacnngatggtgtnnaagagagcnntttttttttttttttttttttttttttttt

SEQ ID NO: 4728 - DNA, 84 bp, synthetic construct
  source 1..84: mol_type = other DNA
tttttttaagcagtggtatcaacgcagagtacnngatggtgtnncgagagatnntttttttttttttttttttttttttttttt

SEQ ID NO: 4729 - DNA, 84 bp, synthetic construct
  source 1..84: mol_type = other DNA
tttttttaagcagtggtatcaacgcagagtacnngatggtgtnnacagatggnntttttttttttttttttttttttttttttt

SEQ ID NO: 4730 - DNA, 84 bp, synthetic construct
  source 1..84: mol_type = other DNA
tttttttaagcagtggtatcaacgcagagtacnngatggtgtnnaggagtcanntttttttttttttttttttttttttttttt

SEQ ID NO: 4731 - DNA, 84 bp, synthetic construct
  source 1..84: mol_type = other DNA
tttttttaagcagtggtatcaacgcagagtacnngatggtgtnncgtgttacnntttttttttttttttttttttttttttttt

SEQ ID NO: 4732 - DNA, 84 bp, synthetic construct
  source 1..84: mol_type = other DNA
tttttttaagcagtggtatcaacgcagagtacnngatggtgtnntagtgtgcnntttttttttttttttttttttttttttttt

SEQ ID NO: 4733 - DNA, 84 bp, synthetic construct
  source 1..84: mol_type = other DNA
tttttttaagcagtggtatcaacgcagagtacnngatggtgtnnctcatgacnntttttttttttttttttttttttttttttt

SEQ ID NO: 4734 - DNA, 84 bp, synthetic construct
  source 1..84: mol_type = other DNA
tttttttaagcagtggtatcaacgcagagtacnngatggtgtnngtatccagnntttttttttttttttttttttttttttttt

SEQ ID NO: 4735 - DNA, 84 bp, synthetic construct
  source 1..84: mol_type = other DNA
tttttttaagcagtggtatcaacgcagagtacnngatggtgtnnacgcctatnntttttttttttttttttttttttttttttt

SEQ ID NO: 4736 - DNA, 84 bp, synthetic construct
  source 1..84: mol_type = other DNA
tttttttaagcagtggtatcaacgcagagtacnngatggtgtnnaacgacctnntttttttttttttttttttttttttttttt

SEQ ID NO: 4737 - DNA, 84 bp, synthetic construct
  source 1..84: mol_type = other DNA
tttttttaagcagtggtatcaacgcagagtacnngatggtgtnnatcaggctnntttttttttttttttttttttttttttttt

SEQ ID NO: 4738 - DNA, 84 bp, synthetic construct
  source 1..84: mol_type = other DNA
tttttttaagcagtggtatcaacgcagagtacnngatggtgtnncaagttcgnntttttttttttttttttttttttttttttt

SEQ ID NO: 4739 - DNA, 84 bp, synthetic construct
  source 1..84: mol_type = other DNA
tttttttaagcagtggtatcaacgcagagtacnngatggtgtnntagccaganntttttttttttttttttttttttttttttt

SEQ ID NO: 4740 - DNA, 84 bp, synthetic construct
  source 1..84: mol_type = other DNA
tttttttaagcagtggtatcaacgcagagtacnngatggtgtnncaatcacgnntttttttttttttttttttttttttttttt

SEQ ID NO: 4741 - DNA, 84 bp, synthetic construct
  source 1..84: mol_type = other DNA
tttttttaagcagtggtatcaacgcagagtacnngatggtgtnngcaacaagnntttttttttttttttttttttttttttttt

SEQ ID NO: 4742 - DNA, 84 bp, synthetic construct
  source 1..84: mol_type = other DNA
tttttttaagcagtggtatcaacgcagagtacnngatggtgtnncacgacaanntttttttttttttttttttttttttttttt

SEQ ID NO: 4743 - DNA, 84 bp, synthetic construct
  source 1..84: mol_type = other DNA
tttttttaagcagtggtatcaacgcagagtacnngatggtgtnntacggaganntttttttttttttttttttttttttttttt

SEQ ID NO: 4744 - DNA, 84 bp, synthetic construct
  source 1..84: mol_type = other DNA
tttttttaagcagtggtatcaacgcagagtacnngatggtgtnncgacaaganntttttttttttttttttttttttttttttt

SEQ ID NO: 4745 - DNA, 84 bp, synthetic construct
  source 1..84: mol_type = other DNA
tttttttaagcagtggtatcaacgcagagtacnngatggtgtnncgaagtganntttttttttttttttttttttttttttttt

SEQ ID NO: 4746 - DNA, 84 bp, synthetic construct
  source 1..84: mol_type = other DNA
tttttttaagcagtggtatcaacgcagagtacnngatggtgtnnagctggtanntttttttttttttttttttttttttttttt

SEQ ID NO: 4747 - DNA, 84 bp, synthetic construct
  source 1..84: mol_type = other DNA
tttttttaagcagtggtatcaacgcagagtacnngatggtgtnnaactaggcnntttttttttttttttttttttttttttttt

SEQ ID NO: 4748 - DNA, 84 bp, synthetic construct
  source 1..84: mol_type = other DNA
tttttttaagcagtggtatcaacgcagagtacnngatggtgtnncagcaagtnntttttttttttttttttttttttttttttt

SEQ ID NO: 4749 - DNA, 84 bp, synthetic construct
  source 1..84: mol_type = other DNA
tttttttaagcagtggtatcaacgcagagtacnngatggtgtnnacgaggtanntttttttttttttttttttttttttttttt

SEQ ID NO: 4750 - DNA, 84 bp, synthetic construct
  source 1..84: mol_type = other DNA
tttttttaagcagtggtatcaacgcagagtacnngatggtgtnncatcttccnntttttttttttttttttttttttttttttt

SEQ ID NO: 4751 - DNA, 84 bp, synthetic construct
  source 1..84: mol_type = other DNA
tttttttaagcagtggtatcaacgcagagtacnngatggtgtnncctgaatcnntttttttttttttttttttttttttttttt

SEQ ID NO: 4752 - DNA, 84 bp, synthetic construct
  source 1..84: mol_type = other DNA
tttttttaagcagtggtatcaacgcagagtacnngatggtgtnntgcagactnntttttttttttttttttttttttttttttt

SEQ ID NO: 4753 - DNA, 84 bp, synthetic construct
  source 1..84: mol_type = other DNA
tttttttaagcagtggtatcaacgcagagtacnngatggtgtnnagatgtggnntttttttttttttttttttttttttttttt

SEQ ID NO: 4754 - DNA, 84 bp, synthetic construct
  source 1..84: mol_type = other DNA
tttttttaagcagtggtatcaacgcagagtacnngatggtgtnnagttcgacnntttttttttttttttttttttttttttttt

SEQ ID NO: 4755 - DNA, 84 bp, synthetic construct
  source 1..84: mol_type = other DNA
tttttttaagcagtggtatcaacgcagagtacnngatggtgtnnacaacctcnntttttttttttttttttttttttttttttt

SEQ ID NO: 4756 - DNA, 84 bp, synthetic construct
  source 1..84: mol_type = other DNA
tttttttaagcagtggtatcaacgcagagtacnngatggtgtnncatggtagnntttttttttttttttttttttttttttttt

SEQ ID NO: 4757 - DNA, 84 bp, synthetic construct
  source 1..84: mol_type = other DNA
tttttttaagcagtggtatcaacgcagagtacnngatggtgtnncgtatctcnntttttttttttttttttttttttttttttt

SEQ ID NO: 4758 - DNA, 84 bp, synthetic construct
  source 1..84: mol_type = other DNA
tttttttaagcagtggtatcaacgcagagtacnngatggtgtnncctagttcnntttttttttttttttttttttttttttttt

SEQ ID NO: 4759 - DNA, 84 bp, synthetic construct
  source 1..84: mol_type = other DNA
tttttttaagcagtggtatcaacgcagagtacnngatggtgtnncaagagtcnntttttttttttttttttttttttttttttt

SEQ ID NO: 4760 - DNA, 84 bp, synthetic construct
  source 1..84: mol_type = other DNA
tttttttaagcagtggtatcaacgcagagtacnnagaaggtcnnaatcggcanntttttttttttttttttttttttttttttt

SEQ ID NO: 4761 - DNA, 84 bp, synthetic construct
  source 1..84: mol_type = other DNA
tttttttaagcagtggtatcaacgcagagtacnnagaaggtcnntacggcatnntttttttttttttttttttttttttttttt

SEQ ID NO: 4762 - DNA, 84 bp, synthetic construct
  source 1..84: mol_type = other DNA
tttttttaagcagtggtatcaacgcagagtacnnagaaggtcnnttggatcgnntttttttttttttttttttttttttttttt

SEQ ID NO: 4763 - DNA, 84 bp, synthetic construct
  source 1..84: mol_type = other DNA
tttttttaagcagtggtatcaacgcagagtacnnagaaggtcnntggaacganntttttttttttttttttttttttttttttt

SEQ ID NO: 4764 - DNA, 84 bp, synthetic construct
  source 1..84: mol_type = other DNA
tttttttaagcagtggtatcaacgcagagtacnnagaaggtcnnggcaatcanntttttttttttttttttttttttttttttt

SEQ ID NO: 4765 - DNA, 84 bp, synthetic construct
  source 1..84: mol_type = other DNA
tttttttaagcagtggtatcaacgcagagtacnnagaaggtcnngaatccganntttttttttttttttttttttttttttttt

SEQ ID NO: 4766 - DNA, 84 bp, synthetic construct
  source 1..84: mol_type = other DNA
tttttttaagcagtggtatcaacgcagagtacnnagaaggtcnnttacggtgnntttttttttttttttttttttttttttttt

SEQ ID NO: 4767 - DNA, 84 bp, synthetic construct
  source 1..84: mol_type = other DNA
tttttttaagcagtggtatcaacgcagagtacnnagaaggtcnncatatcggnntttttttttttttttttttttttttttttt

SEQ ID NO: 4768 - DNA, 84 bp, synthetic construct
  source 1..84: mol_type = other DNA
tttttttaagcagtggtatcaacgcagagtacnnagaaggtcnncttcggtanntttttttttttttttttttttttttttttt

SEQ ID NO: 4769 - DNA, 84 bp, synthetic construct
  source 1..84: mol_type = other DNA
tttttttaagcagtggtatcaacgcagagtacnnagaaggtcnntcctaacgnntttttttttttttttttttttttttttttt

SEQ ID NO: 4770 - DNA, 84 bp, synthetic construct
  source 1..84: mol_type = other DNA
tttttttaagcagtggtatcaacgcagagtacnnagaaggtcnngtaagccanntttttttttttttttttttttttttttttt

SEQ ID NO: 4771 - DNA, 84 bp, synthetic construct
  source 1..84: mol_type = other DNA
tttttttaagcagtggtatcaacgcagagtacnnagaaggtcnntaaggtggnntttttttttttttttttttttttttttttt

SEQ ID NO: 4772 - DNA, 84 bp, synthetic construct
  source 1..84: mol_type = other DNA
tttttttaagcagtggtatcaacgcagagtacnnagaaggtcnnggtaagctnntttttttttttttttttttttttttttttt

SEQ ID NO: 4773 - DNA, 84 bp, synthetic construct
  source 1..84: mol_type = other DNA
tttttttaagcagtggtatcaacgcagagtacnnagaaggtcnntgtgtcganntttttttttttttttttttttttttttttt

SEQ ID NO: 4774 - DNA, 84 bp, synthetic construct
  source 1..84: mol_type = other DNA
tttttttaagcagtggtatcaacgcagagtacnnagaaggtcnngagcatganntttttttttttttttttttttttttttttt

SEQ ID NO: 4775 - DNA, 84 bp, synthetic construct
  source 1..84: mol_type = other DNA
tttttttaagcagtggtatcaacgcagagtacnnagaaggtcnntcgaagtcnntttttttttttttttttttttttttttttt

SEQ ID NO: 4776 - DNA, 84 bp, synthetic construct
  source 1..84: mol_type = other DNA
tttttttaagcagtggtatcaacgcagagtacnnagaaggtcnnggtgaacanntttttttttttttttttttttttttttttt

SEQ ID NO: 4777 - DNA, 84 bp, synthetic construct
  source 1..84: mol_type = other DNA
tttttttaagcagtggtatcaacgcagagtacnnagaaggtcnnacatgcacnntttttttttttttttttttttttttttttt

SEQ ID NO: 4778 - DNA, 84 bp, synthetic construct
  source 1..84: mol_type = other DNA
tttttttaagcagtggtatcaacgcagagtacnnagaaggtcnnccaacagtnntttttttttttttttttttttttttttttt

SEQ ID NO: 4779 - DNA, 84 bp, synthetic construct
  source 1..84: mol_type = other DNA
tttttttaagcagtggtatcaacgcagagtacnnagaaggtcnnagaacagcnntttttttttttttttttttttttttttttt

SEQ ID NO: 4780 - DNA, 84 bp, synthetic construct
  source 1..84: mol_type = other DNA
tttttttaagcagtggtatcaacgcagagtacnnagaaggtcnngaacacgtnntttttttttttttttttttttttttttttt

SEQ ID NO: 4781 - DNA, 84 bp, synthetic construct
  source 1..84: mol_type = other DNA
tttttttaagcagtggtatcaacgcagagtacnnagaaggtcnnggtcttcanntttttttttttttttttttttttttttttt

SEQ ID NO: 4782 - DNA, 84 bp, synthetic construct
  source 1..84: mol_type = other DNA
tttttttaagcagtggtatcaacgcagagtacnnagaaggtcnnaggttcagnntttttttttttttttttttttttttttttt

SEQ ID NO: 4783 - DNA, 84 bp, synthetic construct
  source 1..84: mol_type = other DNA
tttttttaagcagtggtatcaacgcagagtacnnagaaggtcnnctagagcanntttttttttttttttttttttttttttttt

SEQ ID NO: 4784 - DNA, 84 bp, synthetic construct
  source 1..84: mol_type = other DNA
tttttttaagcagtggtatcaacgcagagtacnnagaaggtcnncttctagcnntttttttttttttttttttttttttttttt

SEQ ID NO: 4785 - DNA, 84 bp, synthetic construct
  source 1..84: mol_type = other DNA
tttttttaagcagtggtatcaacgcagagtacnnagaaggtcnngagtaacgnntttttttttttttttttttttttttttttt

SEQ ID NO: 4786 - DNA, 84 bp, synthetic construct
  source 1..84: mol_type = other DNA
tttttttaagcagtggtatcaacgcagagtacnnagaaggtcnnctaagaggnntttttttttttttttttttttttttttttt

SEQ ID NO: 4787 - DNA, 84 bp, synthetic construct
  source 1..84: mol_type = other DNA
tttttttaagcagtggtatcaacgcagagtacnnagaaggtcnnacgtgtagnntttttttttttttttttttttttttttttt

SEQ ID NO: 4788 - DNA, 84 bp, synthetic construct
  source 1..84: mol_type = other DNA
tttttttaagcagtggtatcaacgcagagtacnnagaaggtcnnactacaggnntttttttttttttttttttttttttttttt

SEQ ID NO: 4789 - DNA, 84 bp, synthetic construct
  source 1..84: mol_type = other DNA
tttttttaagcagtggtatcaacgcagagtacnnagaaggtcnntacaggtcnntttttttttttttttttttttttttttttt

SEQ ID NO: 4790 - DNA, 84 bp, synthetic construct
  source 1..84: mol_type = other DNA
tttttttaagcagtggtatcaacgcagagtacnnagaaggtcnnctcacatgnntttttttttttttttttttttttttttttt

SEQ ID NO: 4791 - DNA, 84 bp, synthetic construct
  source 1..84: mol_type = other DNA
tttttttaagcagtggtatcaacgcagagtacnnagaaggtcnnactaggagnntttttttttttttttttttttttttttttt

SEQ ID NO: 4792 - DNA, 84 bp, synthetic construct
  source 1..84: mol_type = other DNA
tttttttaagcagtggtatcaacgcagagtacnnagaaggtcnnccatagganntttttttttttttttttttttttttttttt

SEQ ID NO: 4793 - DNA, 84 bp, synthetic construct
  source 1..84: mol_type = other DNA
tttttttaagcagtggtatcaacgcagagtacnnagaaggtcnnggagaatcnntttttttttttttttttttttttttttttt

SEQ ID NO: 4794 - DNA, 84 bp, synthetic construct
  source 1..84: mol_type = other DNA
tttttttaagcagtggtatcaacgcagagtacnnagaaggtcnngccaagaanntttttttttttttttttttttttttttttt

SEQ ID NO: 4795 - DNA, 84 bp, synthetic construct
  source 1..84: mol_type = other DNA
tttttttaagcagtggtatcaacgcagagtacnnagaaggtcnnaaggcaagnntttttttttttttttttttttttttttttt

SEQ ID NO: 4796 - DNA, 84 bp, synthetic construct
  source 1..84: mol_type = other DNA
tttttttaagcagtggtatcaacgcagagtacnnagaaggtcnnaatgtcgcnntttttttttttttttttttttttttttttt

SEQ ID NO: 4797 - DNA, 84 bp, synthetic construct
  source 1..84: mol_type = other DNA
tttttttaagcagtggtatcaacgcagagtacnnagaaggtcnnatggaaccnntttttttttttttttttttttttttttttt

SEQ ID NO: 4798 - DNA, 84 bp, synthetic construct
  source 1..84: mol_type = other DNA
tttttttaagcagtggtatcaacgcagagtacnnagaaggtcnnagaggcatnntttttttttttttttttttttttttttttt

SEQ ID NO: 4799 - DNA, 84 bp, synthetic construct
  source 1..84: mol_type = other DNA
tttttttaagcagtggtatcaacgcagagtacnnagaaggtcnntgcatagcnntttttttttttttttttttttttttttttt

SEQ ID NO: 4800 - DNA, 84 bp, synthetic construct
  source 1..84: mol_type = other DNA
tttttttaagcagtggtatcaacgcagagtacnnagaaggtcnnctaacgganntttttttttttttttttttttttttttttt

SEQ ID NO: 4801 - DNA, 84 bp, synthetic construct
  source 1..84: mol_type = other DNA
tttttttaagcagtggtatcaacgcagagtacnnagaaggtcnntatcgaggnntttttttttttttttttttttttttttttt

SEQ ID NO: 4802 - DNA, 84 bp, synthetic construct
  source 1..84: mol_type = other DNA
tttttttaagcagtggtatcaacgcagagtacnnagaaggtcnncatagcctnntttttttttttttttttttttttttttttt

SEQ ID NO: 4803 - DNA, 84 bp, synthetic construct
  source 1..84: mol_type = other DNA
tttttttaagcagtggtatcaacgcagagtacnnagaaggtcnnatcgagacnntttttttttttttttttttttttttttttt

SEQ ID NO: 4804 - DNA, 84 bp, synthetic construct
  source 1..84: mol_type = other DNA
tttttttaagcagtggtatcaacgcagagtacnnagaaggtcnnggaagagtnntttttttttttttttttttttttttttttt

SEQ ID NO: 4805 - DNA, 84 bp, synthetic construct
  source 1..84: mol_type = other DNA
tttttttaagcagtggtatcaacgcagagtacnnagaaggtcnnccaagtagnntttttttttttttttttttttttttttttt

SEQ ID NO: 4806 - DNA, 84 bp, synthetic construct
  source 1..84: mol_type = other DNA
tttttttaagcagtggtatcaacgcagagtacnnagaaggtcnnctgaacagnntttttttttttttttttttttttttttttt

SEQ ID NO: 4807 - DNA, 84 bp, synthetic construct
  source 1..84: mol_type = other DNA
tttttttaagcagtggtatcaacgcagagtacnnagaaggtcnngtaggttcnntttttttttttttttttttttttttttttt

SEQ ID NO: 4808 - DNA, 84 bp, synthetic construct
  source 1..84: mol_type = other DNA
tttttttaagcagtggtatcaacgcagagtacnnagaaggtcnngtatggacnntttttttttttttttttttttttttttttt

SEQ ID NO: 4809 - DNA, 84 bp, synthetic construct
  source 1..84: mol_type = other DNA
tttttttaagcagtggtatcaacgcagagtacnnagaaggtcnntcgcaacanntttttttttttttttttttttttttttttt

SEQ ID NO: 4810 - DNA, 84 bp, synthetic construct
  source 1..84: mol_type = other DNA
tttttttaagcagtggtatcaacgcagagtacnnagaaggtcnnccgctaatnntttttttttttttttttttttttttttttt

SEQ ID NO: 4811 - DNA, 84 bp, synthetic construct
  source 1..84: mol_type = other DNA
tttttttaagcagtggtatcaacgcagagtacnnagaaggtcnngattcgcanntttttttttttttttttttttttttttttt

SEQ ID NO: 4812 - DNA, 84 bp, synthetic construct
  source 1..84: mol_type = other DNA
tttttttaagcagtggtatcaacgcagagtacnnagaaggtcnncgatggaanntttttttttttttttttttttttttttttt

SEQ ID NO: 4813 - DNA, 84 bp, synthetic construct
  source 1..84: mol_type = other DNA
tttttttaagcagtggtatcaacgcagagtacnnagaaggtcnnagcaagganntttttttttttttttttttttttttttttt

SEQ ID NO: 4814 - DNA, 84 bp, synthetic construct
  source 1..84: mol_type = other DNA
tttttttaagcagtggtatcaacgcagagtacnnagaaggtcnncgtagcaanntttttttttttttttttttttttttttttt

SEQ ID NO: 4815 - DNA, 84 bp, synthetic construct
  source 1..84: mol_type = other DNA
tttttttaagcagtggtatcaacgcagagtacnnagaaggtcnntggcagtanntttttttttttttttttttttttttttttt

SEQ ID NO: 4816 - DNA, 84 bp, synthetic construct
  source 1..84: mol_type = other DNA
tttttttaagcagtggtatcaacgcagagtacnnagaaggtcnncggtagttnntttttttttttttttttttttttttttttt

SEQ ID NO: 4817 - DNA, 84 bp, synthetic construct
  source 1..84: mol_type = other DNA
tttttttaagcagtggtatcaacgcagagtacnnagaaggtcnntgacttcgnntttttttttttttttttttttttttttttt

SEQ ID NO: 4818 - DNA, 84 bp, synthetic construct
  source 1..84: mol_type = other DNA
tttttttaagcagtggtatcaacgcagagtacnnagaaggtcnngagtgcaanntttttttttttttttttttttttttttttt

SEQ ID NO: 4819 - DNA, 84 bp, synthetic construct
  source 1..84: mol_type = other DNA
tttttttaagcagtggtatcaacgcagagtacnnagaaggtcnnacggtaacnntttttttttttttttttttttttttttttt

SEQ ID NO: 4820 - DNA, 84 bp, synthetic construct
  source 1..84: mol_type = other DNA
tttttttaagcagtggtatcaacgcagagtacnnagaaggtcnnaagtggtgnntttttttttttttttttttttttttttttt

SEQ ID NO: 4821 - DNA, 84 bp, synthetic construct
  source 1..84: mol_type = other DNA
tttttttaagcagtggtatcaacgcagagtacnnagaaggtcnnggagacaanntttttttttttttttttttttttttttttt

SEQ ID NO: 4822 - DNA, 84 bp, synthetic construct
  source 1..84: mol_type = other DNA
tttttttaagcagtggtatcaacgcagagtacnnagaaggtcnntcaaggacnntttttttttttttttttttttttttttttt

SEQ ID NO: 4823 - DNA, 84 bp, synthetic construct
  source 1..84: mol_type = other DNA
tttttttaagcagtggtatcaacgcagagtacnnagaaggtcnnaagagagcnntttttttttttttttttttttttttttttt

SEQ ID NO: 4824 - DNA, 84 bp, synthetic construct
  source 1..84: mol_type = other DNA
tttttttaagcagtggtatcaacgcagagtacnnagaaggtcnncgagagatnntttttttttttttttttttttttttttttt

SEQ ID NO: 4825 - DNA, 84 bp, synthetic construct
  source 1..84: mol_type = other DNA
tttttttaagcagtggtatcaacgcagagtacnnagaaggtcnnacagatggnntttttttttttttttttttttttttttttt

SEQ ID NO: 4826 - DNA, 84 bp, synthetic construct
  source 1..84: mol_type = other DNA
tttttttaagcagtggtatcaacgcagagtacnnagaaggtcnnaggagtcanntttttttttttttttttttttttttttttt

SEQ ID NO: 4827 - DNA, 84 bp, synthetic construct
  source 1..84: mol_type = other DNA
tttttttaagcagtggtatcaacgcagagtacnnagaaggtcnncgtgttacnntttttttttttttttttttttttttttttt

SEQ ID NO: 4828 - DNA, 84 bp, synthetic construct
  source 1..84: mol_type = other DNA
tttttttaagcagtggtatcaacgcagagtacnnagaaggtcnntagtgtgcnntttttttttttttttttttttttttttttt

SEQ ID NO: 4829 - DNA, 84 bp, synthetic construct
  source 1..84: mol_type = other DNA
tttttttaagcagtggtatcaacgcagagtacnnagaaggtcnnctcatgacnntttttttttttttttttttttttttttttt

SEQ ID NO: 4830 - DNA, 84 bp, synthetic construct
  source 1..84: mol_type = other DNA
tttttttaagcagtggtatcaacgcagagtacnnagaaggtcnngtatccagnntttttttttttttttttttttttttttttt

SEQ ID NO: 4831 - DNA, 84 bp, synthetic construct
  source 1..84: mol_type = other DNA
tttttttaagcagtggtatcaacgcagagtacnnagaaggtcnnacgcctatnntttttttttttttttttttttttttttttt

SEQ ID NO: 4832 - DNA, 84 bp, synthetic construct
  source 1..84: mol_type = other DNA
tttttttaagcagtggtatcaacgcagagtacnnagaaggtcnnaacgacctnntttttttttttttttttttttttttttttt

SEQ ID NO: 4833 - DNA, 84 bp, synthetic construct
  source 1..84: mol_type = other DNA
tttttttaagcagtggtatcaacgcagagtacnnagaaggtcnnatcaggctnntttttttttttttttttttttttttttttt

SEQ ID NO: 4834 - DNA, 84 bp, synthetic construct
  source 1..84: mol_type = other DNA
tttttttaagcagtggtatcaacgcagagtacnnagaaggtcnncaagttcgnntttttttttttttttttttttttttttttt

SEQ ID NO: 4835 - DNA, 84 bp, synthetic construct
  source 1..84: mol_type = other DNA
tttttttaagcagtggtatcaacgcagagtacnnagaaggtcnntagccaganntttttttttttttttttttttttttttttt

SEQ ID NO: 4836 - DNA, 84 bp, synthetic construct
  source 1..84: mol_type = other DNA
tttttttaagcagtggtatcaacgcagagtacnnagaaggtcnncaatcacgnntttttttttttttttttttttttttttttt

SEQ ID NO: 4837 - DNA, 84 bp, synthetic construct
  source 1..84: mol_type = other DNA
tttttttaagcagtggtatcaacgcagagtacnnagaaggtcnngcaacaagnntttttttttttttttttttttttttttttt

SEQ ID NO: 4838 - DNA, 84 bp, synthetic construct
  source 1..84: mol_type = other DNA
tttttttaagcagtggtatcaacgcagagtacnnagaaggtcnncacgacaanntttttttttttttttttttttttttttttt

SEQ ID NO: 4839 - DNA, 84 bp, synthetic construct
  source 1..84: mol_type = other DNA
tttttttaagcagtggtatcaacgcagagtacnnagaaggtcnntacggaganntttttttttttttttttttttttttttttt

SEQ ID NO: 4840 - DNA, 84 bp, synthetic construct
  source 1..84: mol_type = other DNA
tttttttaagcagtggtatcaacgcagagtacnnagaaggtcnncgacaaganntttttttttttttttttttttttttttttt

SEQ ID NO: 4841 - DNA, 84 bp, synthetic construct
  source 1..84: mol_type = other DNA
tttttttaagcagtggtatcaacgcagagtacnnagaaggtcnncgaagtganntttttttttttttttttttttttttttttt

SEQ ID NO: 4842 - DNA, 84 bp, synthetic construct
  source 1..84: mol_type = other DNA
tttttttaagcagtggtatcaacgcagagtacnnagaaggtcnnagctggtanntttttttttttttttttttttttttttttt

SEQ ID NO: 4843 - DNA, 84 bp, synthetic construct
  source 1..84: mol_type = other DNA
tttttttaagcagtggtatcaacgcagagtacnnagaaggtcnnaactaggcnntttttttttttttttttttttttttttttt

SEQ ID NO: 4844 - DNA, 84 bp, synthetic construct
  source 1..84: mol_type = other DNA
tttttttaagcagtggtatcaacgcagagtacnnagaaggtcnncagcaagtnntttttttttttttttttttttttttttttt

SEQ ID NO: 4845 - DNA, 84 bp, synthetic construct
  source 1..84: mol_type = other DNA
tttttttaagcagtggtatcaacgcagagtacnnagaaggtcnnacgaggtanntttttttttttttttttttttttttttttt

SEQ ID NO: 4846 - DNA, 84 bp, synthetic construct
  source 1..84: mol_type = other DNA
tttttttaagcagtggtatcaacgcagagtacnnagaaggtcnncatcttccnntttttttttttttttttttttttttttttt

SEQ ID NO: 4847 - DNA, 84 bp, synthetic construct
  source 1..84: mol_type = other DNA
tttttttaagcagtggtatcaacgcagagtacnnagaaggtcnncctgaatcnntttttttttttttttttttttttttttttt

SEQ ID NO: 4848 - DNA, 84 bp, synthetic construct
  source 1..84: mol_type = other DNA
tttttttaagcagtggtatcaacgcagagtacnnagaaggtcnntgcagactnntttttttttttttttttttttttttttttt

SEQ ID NO: 4849 - DNA, 84 bp, synthetic construct
  source 1..84: mol_type = other DNA
tttttttaagcagtggtatcaacgcagagtacnnagaaggtcnnagatgtggnntttttttttttttttttttttttttttttt

SEQ ID NO: 4850 - DNA, 84 bp, synthetic construct
  source 1..84: mol_type = other DNA
tttttttaagcagtggtatcaacgcagagtacnnagaaggtcnnagttcgacnntttttttttttttttttttttttttttttt

SEQ ID NO: 4851 - DNA, 84 bp, synthetic construct
  source 1..84: mol_type = other DNA
tttttttaagcagtggtatcaacgcagagtacnnagaaggtcnnacaacctcnntttttttttttttttttttttttttttttt

SEQ ID NO: 4852 - DNA, 84 bp, synthetic construct
  source 1..84: mol_type = other DNA
tttttttaagcagtggtatcaacgcagagtacnnagaaggtcnncatggtagnntttttttttttttttttttttttttttttt

SEQ ID NO: 4853 - DNA, 84 bp, synthetic construct
  source 1..84: mol_type = other DNA
tttttttaagcagtggtatcaacgcagagtacnnagaaggtcnncgtatctcnntttttttttttttttttttttttttttttt

SEQ ID NO: 4854 - DNA, 84 bp, synthetic construct
  source 1..84: mol_type = other DNA
tttttttaagcagtggtatcaacgcagagtacnnagaaggtcnncctagttcnntttttttttttttttttttttttttttttt

SEQ ID NO: 4855 - DNA, 84 bp, synthetic construct
  source 1..84: mol_type = other DNA
tttttttaagcagtggtatcaacgcagagtacnnagaaggtcnncaagagtcnntttttttttttttttttttttttttttttt

SEQ ID NO: 4856 - DNA, 84 bp, synthetic construct
  source 1..84: mol_type = other DNA
tttttttaagcagtggtatcaacgcagagtacnnaggatgacnnaatcggcanntttttttttttttttttttttttttttttt

SEQ ID NO: 4857 - DNA, 84 bp, synthetic construct
  source 1..84: mol_type = other DNA
tttttttaagcagtggtatcaacgcagagtacnnaggatgacnntacggcatnntttttttttttttttttttttttttttttt

SEQ ID NO: 4858 - DNA, 84 bp, synthetic construct
  source 1..84: mol_type = other DNA
tttttttaagcagtggtatcaacgcagagtacnnaggatgacnnttggatcgnntttttttttttttttttttttttttttttt

SEQ ID NO: 4859 - DNA, 84 bp, synthetic construct
  source 1..84: mol_type = other DNA
tttttttaagcagtggtatcaacgcagagtacnnaggatgacnntggaacganntttttttttttttttttttttttttttttt

SEQ ID NO: 4860 - DNA, 84 bp, synthetic construct
  source 1..84: mol_type = other DNA
tttttttaagcagtggtatcaacgcagagtacnnaggatgacnnggcaatcanntttttttttttttttttttttttttttttt

SEQ ID NO: 4861 - DNA, 84 bp, synthetic construct
  source 1..84: mol_type = other DNA
tttttttaagcagtggtatcaacgcagagtacnnaggatgacnngaatccganntttttttttttttttttttttttttttttt

SEQ ID NO: 4862 - DNA, 84 bp, synthetic construct
  source 1..84: mol_type = other DNA
tttttttaagcagtggtatcaacgcagagtacnnaggatgacnnttacggtgnntttttttttttttttttttttttttttttt

SEQ ID NO: 4863 - DNA, 84 bp, synthetic construct
  source 1..84: mol_type = other DNA
tttttttaagcagtggtatcaacgcagagtacnnaggatgacnncatatcggnntttttttttttttttttttttttttttttt

SEQ ID NO: 4864 - DNA, 84 bp, synthetic construct
  source 1..84: mol_type = other DNA
tttttttaagcagtggtatcaacgcagagtacnnaggatgacnncttcggtanntttttttttttttttttttttttttttttt

SEQ ID NO: 4865 - DNA, 84 bp, synthetic construct
  source 1..84: mol_type = other DNA
tttttttaagcagtggtatcaacgcagagtacnnaggatgacnntcctaacgnntttttttttttttttttttttttttttttt

SEQ ID NO: 4866 - DNA, 84 bp, synthetic construct
  source 1..84: mol_type = other DNA
tttttttaagcagtggtatcaacgcagagtacnnaggatgacnngtaagccanntttttttttttttttttttttttttttttt

SEQ ID NO: 4867 - DNA, 84 bp, synthetic construct
  source 1..84: mol_type = other DNA
tttttttaagcagtggtatcaacgcagagtacnnaggatgacnntaaggtggnntttttttttttttttttttttttttttttt

SEQ ID NO: 4868 - DNA, 84 bp, synthetic construct
  source 1..84: mol_type = other DNA
tttttttaagcagtggtatcaacgcagagtacnnaggatgacnnggtaagctnntttttttttttttttttttttttttttttt

SEQ ID NO: 4869 - DNA, 84 bp, synthetic construct
  source 1..84: mol_type = other DNA
tttttttaagcagtggtatcaacgcagagtacnnaggatgacnntgtgtcganntttttttttttttttttttttttttttttt

SEQ ID NO: 4870 - DNA, 84 bp, synthetic construct
  source 1..84: mol_type = other DNA
tttttttaagcagtggtatcaacgcagagtacnnaggatgacnngagcatganntttttttttttttttttttttttttttttt

SEQ ID NO: 4871 - DNA, 84 bp, synthetic construct
  source 1..84: mol_type = other DNA
tttttttaagcagtggtatcaacgcagagtacnnaggatgacnntcgaagtcnntttttttttttttttttttttttttttttt

SEQ ID NO: 4872 - DNA, 84 bp, synthetic construct
  source 1..84: mol_type = other DNA
tttttttaagcagtggtatcaacgcagagtacnnaggatgacnnggtgaacanntttttttttttttttttttttttttttttt

SEQ ID NO: 4873 - DNA, 84 bp, synthetic construct
  source 1..84: mol_type = other DNA
tttttttaagcagtggtatcaacgcagagtacnnaggatgacnnacatgcacnntttttttttttttttttttttttttttttt

SEQ ID NO: 4874 - DNA, 84 bp, synthetic construct
  source 1..84: mol_type = other DNA
tttttttaagcagtggtatcaacgcagagtacnnaggatgacnnccaacagtnntttttttttttttttttttttttttttttt

SEQ ID NO: 4875 - DNA, 84 bp, synthetic construct
  source 1..84: mol_type = other DNA
tttttttaagcagtggtatcaacgcagagtacnnaggatgacnnagaacagcnntttttttttttttttttttttttttttttt

SEQ ID NO: 4876 - DNA, 84 bp, synthetic construct
  source 1..84: mol_type = other DNA
tttttttaagcagtggtatcaacgcagagtacnnaggatgacnngaacacgtnntttttttttttttttttttttttttttttt

SEQ ID NO: 4877 - DNA, 84 bp, synthetic construct
  source 1..84: mol_type = other DNA
tttttttaagcagtggtatcaacgcagagtacnnaggatgacnnggtcttcanntttttttttttttttttttttttttttttt

SEQ ID NO: 4878 - DNA, 84 bp, synthetic construct
  source 1..84: mol_type = other DNA
tttttttaagcagtggtatcaacgcagagtacnnaggatgacnnaggttcagnntttttttttttttttttttttttttttttt

SEQ ID NO: 4879 - DNA, 84 bp, synthetic construct
  source 1..84: mol_type = other DNA
tttttttaagcagtggtatcaacgcagagtacnnaggatgacnnctagagcanntttttttttttttttttttttttttttttt

SEQ ID NO: 4880 - DNA, 84 bp, synthetic construct
  source 1..84: mol_type = other DNA
tttttttaagcagtggtatcaacgcagagtacnnaggatgacnncttctagcnntttttttttttttttttttttttttttttt

SEQ ID NO: 4881 - DNA, 84 bp, synthetic construct
  source 1..84: mol_type = other DNA
tttttttaagcagtggtatcaacgcagagtacnnaggatgacnngagtaacgnntttttttttttttttttttttttttttttt

SEQ ID NO: 4882 - DNA, 84 bp, synthetic construct
  source 1..84: mol_type = other DNA
tttttttaagcagtggtatcaacgcagagtacnnaggatgacnnctaagaggnntttttttttttttttttttttttttttttt

SEQ ID NO: 4883 - DNA, 84 bp, synthetic construct
  source 1..84: mol_type = other DNA
tttttttaagcagtggtatcaacgcagagtacnnaggatgacnnacgtgtagnntttttttttttttttttttttttttttttt

SEQ ID NO: 4884 - DNA, 84 bp, synthetic construct
  source 1..84: mol_type = other DNA
tttttttaagcagtggtatcaacgcagagtacnnaggatgacnnactacaggnntttttttttttttttttttttttttttttt

SEQ ID NO: 4885 - DNA, 84 bp, synthetic construct
  source 1..84: mol_type = other DNA
tttttttaagcagtggtatcaacgcagagtacnnaggatgacnntacaggtcnntttttttttttttttttttttttttttttt

SEQ ID NO: 4886 - DNA, 84 bp, synthetic construct
  source 1..84: mol_type = other DNA
tttttttaagcagtggtatcaacgcagagtacnnaggatgacnnctcacatgnntttttttttttttttttttttttttttttt

SEQ ID NO: 4887 - DNA, 84 bp, synthetic construct
  source 1..84: mol_type = other DNA
tttttttaagcagtggtatcaacgcagagtacnnaggatgacnnactaggagnntttttttttttttttttttttttttttttt

SEQ ID NO: 4888 - DNA, 84 bp, synthetic construct
  source 1..84: mol_type = other DNA
tttttttaagcagtggtatcaacgcagagtacnnaggatgacnnccatagganntttttttttttttttttttttttttttttt

SEQ ID NO: 4889 - DNA, 84 bp, synthetic construct
  source 1..84: mol_type = other DNA
tttttttaagcagtggtatcaacgcagagtacnnaggatgacnnggagaatcnntttttttttttttttttttttttttttttt

SEQ ID NO: 4890 - DNA, 84 bp, synthetic construct
  source 1..84: mol_type = other DNA
tttttttaagcagtggtatcaacgcagagtacnnaggatgacnngccaagaanntttttttttttttttttttttttttttttt

SEQ ID NO: 4891 - DNA, 84 bp, synthetic construct
  source 1..84: mol_type = other DNA
tttttttaagcagtggtatcaacgcagagtacnnaggatgacnnaaggcaagnntttttttttttttttttttttttttttttt

SEQ ID NO: 4892 - DNA, 84 bp, synthetic construct
  source 1..84: mol_type = other DNA
tttttttaagcagtggtatcaacgcagagtacnnaggatgacnnaatgtcgcnntttttttttttttttttttttttttttttt

SEQ ID NO: 4893 - DNA, 84 bp, synthetic construct
  source 1..84: mol_type = other DNA
tttttttaagcagtggtatcaacgcagagtacnnaggatgacnnatggaaccnntttttttttttttttttttttttttttttt

SEQ ID NO: 4894 - DNA, 84 bp, synthetic construct
  source 1..84: mol_type = other DNA
tttttttaagcagtggtatcaacgcagagtacnnaggatgacnnagaggcatnntttttttttttttttttttttttttttttt

SEQ ID NO: 4895 - DNA, 84 bp, synthetic construct
  source 1..84: mol_type = other DNA
tttttttaagcagtggtatcaacgcagagtacnnaggatgacnntgcatagcnntttttttttttttttttttttttttttttt

SEQ ID NO: 4896 - DNA, 84 bp, synthetic construct
  source 1..84: mol_type = other DNA
tttttttaagcagtggtatcaacgcagagtacnnaggatgacnnctaacgganntttttttttttttttttttttttttttttt

SEQ ID NO: 4897 - DNA, 84 bp, synthetic construct
  source 1..84: mol_type = other DNA
tttttttaagcagtggtatcaacgcagagtacnnaggatgacnntatcgaggnntttttttttttttttttttttttttttttt

SEQ ID NO: 4898 - DNA, 84 bp, synthetic construct
  source 1..84: mol_type = other DNA
tttttttaagcagtggtatcaacgcagagtacnnaggatgacnncatagcctnntttttttttttttttttttttttttttttt

SEQ ID NO: 4899 - DNA, 84 bp, synthetic construct
  source 1..84: mol_type = other DNA
tttttttaagcagtggtatcaacgcagagtacnnaggatgacnnatcgagacnntttttttttttttttttttttttttttttt

SEQ ID NO: 4900 - DNA, 84 bp, synthetic construct
  source 1..84: mol_type = other DNA
tttttttaagcagtggtatcaacgcagagtacnnaggatgacnnggaagagtnntttttttttttttttttttttttttttttt

SEQ ID NO: 4901 - DNA, 84 bp, synthetic construct
  source 1..84: mol_type = other DNA
tttttttaagcagtggtatcaacgcagagtacnnaggatgacnnccaagtagnntttttttttttttttttttttttttttttt

SEQ ID NO: 4902 - DNA, 84 bp, synthetic construct
  source 1..84: mol_type = other DNA
tttttttaagcagtggtatcaacgcagagtacnnaggatgacnnctgaacagnntttttttttttttttttttttttttttttt

SEQ ID NO: 4903 - DNA, 84 bp, synthetic construct
  source 1..84: mol_type = other DNA
tttttttaagcagtggtatcaacgcagagtacnnaggatgacnngtaggttcnntttttttttttttttttttttttttttttt

SEQ ID NO: 4904 - DNA, 84 bp, synthetic construct
  source 1..84: mol_type = other DNA
tttttttaagcagtggtatcaacgcagagtacnnaggatgacnngtatggacnntttttttttttttttttttttttttttttt

SEQ ID NO: 4905 - DNA, 84 bp, synthetic construct
  source 1..84: mol_type = other DNA
tttttttaagcagtggtatcaacgcagagtacnnaggatgacnntcgcaacanntttttttttttttttttttttttttttttt

SEQ ID NO: 4906 - DNA, 84 bp, synthetic construct
  source 1..84: mol_type = other DNA
tttttttaagcagtggtatcaacgcagagtacnnaggatgacnnccgctaatnntttttttttttttttttttttttttttttt

SEQ ID NO: 4907 - DNA, 84 bp, synthetic construct
  source 1..84: mol_type = other DNA
tttttttaagcagtggtatcaacgcagagtacnnaggatgacnngattcgcanntttttttttttttttttttttttttttttt

SEQ ID NO: 4908 - DNA, 84 bp, synthetic construct
  source 1..84: mol_type = other DNA
tttttttaagcagtggtatcaacgcagagtacnnaggatgacnncgatggaanntttttttttttttttttttttttttttttt

SEQ ID NO: 4909 - DNA, 84 bp, synthetic construct
  source 1..84: mol_type = other DNA
tttttttaagcagtggtatcaacgcagagtacnnaggatgacnnagcaagganntttttttttttttttttttttttttttttt

SEQ ID NO: 4910 - DNA, 84 bp, synthetic construct
  source 1..84: mol_type = other DNA
tttttttaagcagtggtatcaacgcagagtacnnaggatgacnncgtagcaanntttttttttttttttttttttttttttttt

SEQ ID NO: 4911 - DNA, 84 bp, synthetic construct
  source 1..84: mol_type = other DNA
tttttttaagcagtggtatcaacgcagagtacnnaggatgacnntggcagtanntttttttttttttttttttttttttttttt

SEQ ID NO: 4912 - DNA, 84 bp, synthetic construct
  source 1..84: mol_type = other DNA
tttttttaagcagtggtatcaacgcagagtacnnaggatgacnncggtagttnntttttttttttttttttttttttttttttt

SEQ ID NO: 4913 - DNA, 84 bp, synthetic construct
  source 1..84: mol_type = other DNA
tttttttaagcagtggtatcaacgcagagtacnnaggatgacnntgacttcgnntttttttttttttttttttttttttttttt

SEQ ID NO: 4914 - DNA, 84 bp, synthetic construct
  source 1..84: mol_type = other DNA
tttttttaagcagtggtatcaacgcagagtacnnaggatgacnngagtgcaanntttttttttttttttttttttttttttttt

SEQ ID NO: 4915 - DNA, 84 bp, synthetic construct
  source 1..84: mol_type = other DNA
tttttttaagcagtggtatcaacgcagagtacnnaggatgacnnacggtaacnntttttttttttttttttttttttttttttt

SEQ ID NO: 4916 - DNA, 84 bp, synthetic construct
  source 1..84: mol_type = other DNA
tttttttaagcagtggtatcaacgcagagtacnnaggatgacnnaagtggtgnntttttttttttttttttttttttttttttt

SEQ ID NO: 4917 - DNA, 84 bp, synthetic construct
  source 1..84: mol_type = other DNA
tttttttaagcagtggtatcaacgcagagtacnnaggatgacnnggagacaanntttttttttttttttttttttttttttttt

SEQ ID NO: 4918 - DNA, 84 bp, synthetic construct
  source 1..84: mol_type = other DNA
tttttttaagcagtggtatcaacgcagagtacnnaggatgacnntcaaggacnntttttttttttttttttttttttttttttt

SEQ ID NO: 4919 - DNA, 84 bp, synthetic construct
  source 1..84: mol_type = other DNA
tttttttaagcagtggtatcaacgcagagtacnnaggatgacnnaagagagcnntttttttttttttttttttttttttttttt

SEQ ID NO: 4920 - DNA, 84 bp, synthetic construct
  source 1..84: mol_type = other DNA
tttttttaagcagtggtatcaacgcagagtacnnaggatgacnncgagagatnntttttttttttttttttttttttttttttt

SEQ ID NO: 4921 - DNA, 84 bp, synthetic construct
  source 1..84: mol_type = other DNA
tttttttaagcagtggtatcaacgcagagtacnnaggatgacnnacagatggnntttttttttttttttttttttttttttttt

SEQ ID NO: 4922 - DNA, 84 bp, synthetic construct
  source 1..84: mol_type = other DNA
tttttttaagcagtggtatcaacgcagagtacnnaggatgacnnaggagtcanntttttttttttttttttttttttttttttt

SEQ ID NO: 4923 - DNA, 84 bp, synthetic construct
  source 1..84: mol_type = other DNA
tttttttaagcagtggtatcaacgcagagtacnnaggatgacnncgtgttacnntttttttttttttttttttttttttttttt

SEQ ID NO: 4924 - DNA, 84 bp, synthetic construct
  source 1..84: mol_type = other DNA
tttttttaagcagtggtatcaacgcagagtacnnaggatgacnntagtgtgcnntttttttttttttttttttttttttttttt

SEQ ID NO: 4925 - DNA, 84 bp, synthetic construct
  source 1..84: mol_type = other DNA
tttttttaagcagtggtatcaacgcagagtacnnaggatgacnnctcatgacnntttttttttttttttttttttttttttttt

SEQ ID NO: 4926 - DNA, 84 bp, synthetic construct
  source 1..84: mol_type = other DNA
tttttttaagcagtggtatcaacgcagagtacnnaggatgacnngtatccagnntttttttttttttttttttttttttttttt

SEQ ID NO: 4927 - DNA, 84 bp, synthetic construct
  source 1..84: mol_type = other DNA
tttttttaagcagtggtatcaacgcagagtacnnaggatgacnnacgcctatnntttttttttttttttttttttttttttttt

SEQ ID NO: 4928 - DNA, 84 bp, synthetic construct
  source 1..84: mol_type = other DNA
tttttttaagcagtggtatcaacgcagagtacnnaggatgacnnaacgacctnntttttttttttttttttttttttttttttt

SEQ ID NO: 4929 - DNA, 84 bp, synthetic construct
  source 1..84: mol_type = other DNA
tttttttaagcagtggtatcaacgcagagtacnnaggatgacnnatcaggctnntttttttttttttttttttttttttttttt

SEQ ID NO: 4930 - DNA, 84 bp, synthetic construct
  source 1..84: mol_type = other DNA
tttttttaagcagtggtatcaacgcagagtacnnaggatgacnncaagttcgnntttttttttttttttttttttttttttttt

SEQ ID NO: 4931 - DNA, 84 bp, synthetic construct
  source 1..84: mol_type = other DNA
tttttttaagcagtggtatcaacgcagagtacnnaggatgacnntagccaganntttttttttttttttttttttttttttttt

SEQ ID NO: 4932 - DNA, 84 bp, synthetic construct
  source 1..84: mol_type = other DNA
tttttttaagcagtggtatcaacgcagagtacnnaggatgacnncaatcacgnntttttttttttttttttttttttttttttt

SEQ ID NO: 4933 - DNA, 84 bp, synthetic construct
  source 1..84: mol_type = other DNA
tttttttaagcagtggtatcaacgcagagtacnnaggatgacnngcaacaagnntttttttttttttttttttttttttttttt

SEQ ID NO: 4934 - DNA, 84 bp, synthetic construct
  source 1..84: mol_type = other DNA
tttttttaagcagtggtatcaacgcagagtacnnaggatgacnncacgacaanntttttttttttttttttttttttttttttt

SEQ ID NO: 4935 - DNA, 84 bp, synthetic construct
  source 1..84: mol_type = other DNA
tttttttaagcagtggtatcaacgcagagtacnnaggatgacnntacggaganntttttttttttttttttttttttttttttt

SEQ ID NO: 4936 - DNA, 84 bp, synthetic construct
  source 1..84: mol_type = other DNA
tttttttaagcagtggtatcaacgcagagtacnnaggatgacnncgacaaganntttttttttttttttttttttttttttttt

SEQ ID NO: 4937 - DNA, 84 bp, synthetic construct
  source 1..84: mol_type = other DNA
tttttttaagcagtggtatcaacgcagagtacnnaggatgacnncgaagtganntttttttttttttttttttttttttttttt

SEQ ID NO: 4938 - DNA, 84 bp, synthetic construct
  source 1..84: mol_type = other DNA
tttttttaagcagtggtatcaacgcagagtacnnaggatgacnnagctggtanntttttttttttttttttttttttttttttt

SEQ ID NO: 4939 - DNA, 84 bp, synthetic construct
  source 1..84: mol_type = other DNA
tttttttaagcagtggtatcaacgcagagtacnnaggatgacnnaactaggcnntttttttttttttttttttttttttttttt

SEQ ID NO: 4940 - DNA, 84 bp, synthetic construct
  source 1..84: mol_type = other DNA
tttttttaagcagtggtatcaacgcagagtacnnaggatgacnncagcaagtnntttttttttttttttttttttttttttttt

SEQ ID NO: 4941 - DNA, 84 bp, synthetic construct
  source 1..84: mol_type = other DNA
tttttttaagcagtggtatcaacgcagagtacnnaggatgacnnacgaggtanntttttttttttttttttttttttttttttt

SEQ ID NO: 4942 - DNA, 84 bp, synthetic construct
  source 1..84: mol_type = other DNA
tttttttaagcagtggtatcaacgcagagtacnnaggatgacnncatcttccnntttttttttttttttttttttttttttttt

SEQ ID NO: 4943 - DNA, 84 bp, synthetic construct
  source 1..84: mol_type = other DNA
tttttttaagcagtggtatcaacgcagagtacnnaggatgacnncctgaatcnntttttttttttttttttttttttttttttt

SEQ ID NO: 4944 - DNA, 84 bp, synthetic construct
  source 1..84: mol_type = other DNA
tttttttaagcagtggtatcaacgcagagtacnnaggatgacnntgcagactnntttttttttttttttttttttttttttttt

SEQ ID NO: 4945 - DNA, 84 bp, synthetic construct
  source 1..84: mol_type = other DNA
tttttttaagcagtggtatcaacgcagagtacnnaggatgacnnagatgtggnntttttttttttttttttttttttttttttt

SEQ ID NO: 4946 - DNA, 84 bp, synthetic construct
  source 1..84: mol_type = other DNA
tttttttaagcagtggtatcaacgcagagtacnnaggatgacnnagttcgacnntttttttttttttttttttttttttttttt

SEQ ID NO: 4947 - DNA, 84 bp, synthetic construct
  source 1..84: mol_type = other DNA
tttttttaagcagtggtatcaacgcagagtacnnaggatgacnnacaacctcnntttttttttttttttttttttttttttttt

SEQ ID NO: 4948 - DNA, 84 bp, synthetic construct
  source 1..84: mol_type = other DNA
tttttttaagcagtggtatcaacgcagagtacnnaggatgacnncatggtagnntttttttttttttttttttttttttttttt

SEQ ID NO: 4949 - DNA, 84 bp, synthetic construct
  source 1..84: mol_type = other DNA
tttttttaagcagtggtatcaacgcagagtacnnaggatgacnncgtatctcnntttttttttttttttttttttttttttttt

SEQ ID NO: 4950 - DNA, 84 bp, synthetic construct
  source 1..84: mol_type = other DNA
tttttttaagcagtggtatcaacgcagagtacnnaggatgacnncctagttcnntttttttttttttttttttttttttttttt

SEQ ID NO: 4951 - DNA, 84 bp, synthetic construct
  source 1..84: mol_type = other DNA
tttttttaagcagtggtatcaacgcagagtacnnaggatgacnncaagagtcnntttttttttttttttttttttttttttttt

SEQ ID NO: 4952 - DNA, 84 bp, synthetic construct
  source 1..84: mol_type = other DNA
tttttttaagcagtggtatcaacgcagagtacnnggtaggtannaatcggcanntttttttttttttttttttttttttttttt

SEQ ID NO: 4953 - DNA, 84 bp, synthetic construct
  source 1..84: mol_type = other DNA
tttttttaagcagtggtatcaacgcagagtacnnggtaggtanntacggcatnntttttttttttttttttttttttttttttt

SEQ ID NO: 4954 - DNA, 84 bp, synthetic construct
  source 1..84: mol_type = other DNA
tttttttaagcagtggtatcaacgcagagtacnnggtaggtannttggatcgnntttttttttttttttttttttttttttttt

SEQ ID NO: 4955 - DNA, 84 bp, synthetic construct
  source 1..84: mol_type = other DNA
tttttttaagcagtggtatcaacgcagagtacnnggtaggtanntggaacganntttttttttttttttttttttttttttttt

SEQ ID NO: 4956 - DNA, 84 bp, synthetic construct
  source 1..84: mol_type = other DNA
tttttttaagcagtggtatcaacgcagagtacnnggtaggtannggcaatcanntttttttttttttttttttttttttttttt

SEQ ID NO: 4957 - DNA, 84 bp, synthetic construct
  source 1..84: mol_type = other DNA
tttttttaagcagtggtatcaacgcagagtacnnggtaggtanngaatccganntttttttttttttttttttttttttttttt

SEQ ID NO: 4958 - DNA, 84 bp, synthetic construct
  source 1..84: mol_type = other DNA
tttttttaagcagtggtatcaacgcagagtacnnggtaggtannttacggtgnntttttttttttttttttttttttttttttt

SEQ ID NO: 4959 - DNA, 84 bp, synthetic construct
  source 1..84: mol_type = other DNA
tttttttaagcagtggtatcaacgcagagtacnnggtaggtanncatatcggnntttttttttttttttttttttttttttttt

SEQ ID NO: 4960 - DNA, 84 bp, synthetic construct
  source 1..84: mol_type = other DNA
tttttttaagcagtggtatcaacgcagagtacnnggtaggtanncttcggtanntttttttttttttttttttttttttttttt

SEQ ID NO: 4961 - DNA, 84 bp, synthetic construct
  source 1..84: mol_type = other DNA
tttttttaagcagtggtatcaacgcagagtacnnggtaggtanntcctaacgnntttttttttttttttttttttttttttttt

SEQ ID NO: 4962 - DNA, 84 bp, synthetic construct
  source 1..84: mol_type = other DNA
tttttttaagcagtggtatcaacgcagagtacnnggtaggtanngtaagccanntttttttttttttttttttttttttttttt

SEQ ID NO: 4963 - DNA, 84 bp, synthetic construct
  source 1..84: mol_type = other DNA
tttttttaagcagtggtatcaacgcagagtacnnggtaggtanntaaggtggnntttttttttttttttttttttttttttttt

SEQ ID NO: 4964 - DNA, 84 bp, synthetic construct
  source 1..84: mol_type = other DNA
tttttttaagcagtggtatcaacgcagagtacnnggtaggtannggtaagctnntttttttttttttttttttttttttttttt

SEQ ID NO: 4965 - DNA, 84 bp, synthetic construct
  source 1..84: mol_type = other DNA
tttttttaagcagtggtatcaacgcagagtacnnggtaggtanntgtgtcganntttttttttttttttttttttttttttttt

SEQ ID NO: 4966 - DNA, 84 bp, synthetic construct
  source 1..84: mol_type = other DNA
tttttttaagcagtggtatcaacgcagagtacnnggtaggtanngagcatganntttttttttttttttttttttttttttttt

SEQ ID NO: 4967 - DNA, 84 bp, synthetic construct
  source 1..84: mol_type = other DNA
tttttttaagcagtggtatcaacgcagagtacnnggtaggtanntcgaagtcnntttttttttttttttttttttttttttttt

SEQ ID NO: 4968 - DNA, 84 bp, synthetic construct
  source 1..84: mol_type = other DNA
tttttttaagcagtggtatcaacgcagagtacnnggtaggtannggtgaacanntttttttttttttttttttttttttttttt

SEQ ID NO: 4969 - DNA, 84 bp, synthetic construct
  source 1..84: mol_type = other DNA
tttttttaagcagtggtatcaacgcagagtacnnggtaggtannacatgcacnntttttttttttttttttttttttttttttt

SEQ ID NO: 4970 - DNA, 84 bp, synthetic construct
  source 1..84: mol_type = other DNA
tttttttaagcagtggtatcaacgcagagtacnnggtaggtannccaacagtnntttttttttttttttttttttttttttttt

SEQ ID NO: 4971 - DNA, 84 bp, synthetic construct
  source 1..84: mol_type = other DNA
tttttttaagcagtggtatcaacgcagagtacnnggtaggtannagaacagcnntttttttttttttttttttttttttttttt

SEQ ID NO: 4972 - DNA, 84 bp, synthetic construct
  source 1..84: mol_type = other DNA
tttttttaagcagtggtatcaacgcagagtacnnggtaggtanngaacacgtnntttttttttttttttttttttttttttttt

SEQ ID NO: 4973 - DNA, 84 bp, synthetic construct
  source 1..84: mol_type = other DNA
tttttttaagcagtggtatcaacgcagagtacnnggtaggtannggtcttcanntttttttttttttttttttttttttttttt

SEQ ID NO: 4974 - DNA, 84 bp, synthetic construct
  source 1..84: mol_type = other DNA
tttttttaagcagtggtatcaacgcagagtacnnggtaggtannaggttcagnntttttttttttttttttttttttttttttt

SEQ ID NO: 4975 - DNA, 84 bp, synthetic construct
  source 1..84: mol_type = other DNA
tttttttaagcagtggtatcaacgcagagtacnnggtaggtannctagagcanntttttttttttttttttttttttttttttt

SEQ ID NO: 4976 - DNA, 84 bp, synthetic construct
  source 1..84: mol_type = other DNA
tttttttaagcagtggtatcaacgcagagtacnnggtaggtanncttctagcnntttttttttttttttttttttttttttttt

SEQ ID NO: 4977 - DNA, 84 bp, synthetic construct
  source 1..84: mol_type = other DNA
tttttttaagcagtggtatcaacgcagagtacnnggtaggtanngagtaacgnntttttttttttttttttttttttttttttt

SEQ ID NO: 4978 - DNA, 84 bp, synthetic construct
  source 1..84: mol_type = other DNA
tttttttaagcagtggtatcaacgcagagtacnnggtaggtannctaagaggnntttttttttttttttttttttttttttttt

SEQ ID NO: 4979 - DNA, 84 bp, synthetic construct
  source 1..84: mol_type = other DNA
tttttttaagcagtggtatcaacgcagagtacnnggtaggtannacgtgtagnntttttttttttttttttttttttttttttt

SEQ ID NO: 4980 - DNA, 84 bp, synthetic construct
  source 1..84: mol_type = other DNA
tttttttaagcagtggtatcaacgcagagtacnnggtaggtannactacaggnntttttttttttttttttttttttttttttt

SEQ ID NO: 4981 - DNA, 84 bp, synthetic construct
  source 1..84: mol_type = other DNA
tttttttaagcagtggtatcaacgcagagtacnnggtaggtanntacaggtcnntttttttttttttttttttttttttttttt

SEQ ID NO: 4982 - DNA, 84 bp, synthetic construct
  source 1..84: mol_type = other DNA
tttttttaagcagtggtatcaacgcagagtacnnggtaggtannctcacatgnntttttttttttttttttttttttttttttt

SEQ ID NO: 4983 - DNA, 84 bp, synthetic construct
  source 1..84: mol_type = other DNA
tttttttaagcagtggtatcaacgcagagtacnnggtaggtannactaggagnntttttttttttttttttttttttttttttt

SEQ ID NO: 4984 - DNA, 84 bp, synthetic construct
  source 1..84: mol_type = other DNA
tttttttaagcagtggtatcaacgcagagtacnnggtaggtannccatagganntttttttttttttttttttttttttttttt

SEQ ID NO: 4985 - DNA, 84 bp, synthetic construct
  source 1..84: mol_type = other DNA
tttttttaagcagtggtatcaacgcagagtacnnggtaggtannggagaatcnntttttttttttttttttttttttttttttt

SEQ ID NO: 4986 - DNA, 84 bp, synthetic construct
  source 1..84: mol_type = other DNA
tttttttaagcagtggtatcaacgcagagtacnnggtaggtanngccaagaanntttttttttttttttttttttttttttttt

SEQ ID NO: 4987 - DNA, 84 bp, synthetic construct
  source 1..84: mol_type = other DNA
tttttttaagcagtggtatcaacgcagagtacnnggtaggtannaaggcaagnntttttttttttttttttttttttttttttt

SEQ ID NO: 4988 - DNA, 84 bp, synthetic construct
  source 1..84: mol_type = other DNA
tttttttaagcagtggtatcaacgcagagtacnnggtaggtannaatgtcgcnntttttttttttttttttttttttttttttt

SEQ ID NO: 4989 - DNA, 84 bp, synthetic construct
  source 1..84: mol_type = other DNA
tttttttaagcagtggtatcaacgcagagtacnnggtaggtannatggaaccnntttttttttttttttttttttttttttttt

SEQ ID NO: 4990 - DNA, 84 bp, synthetic construct
  source 1..84: mol_type = other DNA
tttttttaagcagtggtatcaacgcagagtacnnggtaggtannagaggcatnntttttttttttttttttttttttttttttt

SEQ ID NO: 4991 - DNA, 84 bp, synthetic construct
  source 1..84: mol_type = other DNA
tttttttaagcagtggtatcaacgcagagtacnnggtaggtanntgcatagcnntttttttttttttttttttttttttttttt

SEQ ID NO: 4992 - DNA, 84 bp, synthetic construct
  source 1..84: mol_type = other DNA
tttttttaagcagtggtatcaacgcagagtacnnggtaggtannctaacgganntttttttttttttttttttttttttttttt

SEQ ID NO: 4993 - DNA, 84 bp, synthetic construct
  source 1..84: mol_type = other DNA
tttttttaagcagtggtatcaacgcagagtacnnggtaggtanntatcgaggnntttttttttttttttttttttttttttttt

SEQ ID NO: 4994 - DNA, 84 bp, synthetic construct
  source 1..84: mol_type = other DNA
tttttttaagcagtggtatcaacgcagagtacnnggtaggtanncatagcctnntttttttttttttttttttttttttttttt

SEQ ID NO: 4995 - DNA, 84 bp, synthetic construct
  source 1..84: mol_type = other DNA
tttttttaagcagtggtatcaacgcagagtacnnggtaggtannatcgagacnntttttttttttttttttttttttttttttt

SEQ ID NO: 4996 - DNA, 84 bp, synthetic construct
  source 1..84: mol_type = other DNA
tttttttaagcagtggtatcaacgcagagtacnnggtaggtannggaagagtnntttttttttttttttttttttttttttttt

SEQ ID NO: 4997 - DNA, 84 bp, synthetic construct
  source 1..84: mol_type = other DNA
tttttttaagcagtggtatcaacgcagagtacnnggtaggtannccaagtagnntttttttttttttttttttttttttttttt

SEQ ID NO: 4998 - DNA, 84 bp, synthetic construct
  source 1..84: mol_type = other DNA
tttttttaagcagtggtatcaacgcagagtacnnggtaggtannctgaacagnntttttttttttttttttttttttttttttt

SEQ ID NO: 4999 - DNA, 84 bp, synthetic construct
  source 1..84: mol_type = other DNA
tttttttaagcagtggtatcaacgcagagtacnnggtaggtanngtaggttcnntttttttttttttttttttttttttttttt

SEQ ID NO: 5000 - DNA, 84 bp, synthetic construct
  source 1..84: mol_type = other DNA
tttttttaagcagtggtatcaacgcagagtacnnggtaggtanngtatggacnntttttttttttttttttttttttttttttt

SEQ ID NO: 5001 - DNA, 84 bp, synthetic construct
  source 1..84: mol_type = other DNA
tttttttaagcagtggtatcaacgcagagtacnnggtaggtanntcgcaacanntttttttttttttttttttttttttttttt

SEQ ID NO: 5002 - DNA, 84 bp, synthetic construct
  source 1..84: mol_type = other DNA
tttttttaagcagtggtatcaacgcagagtacnnggtaggtannccgctaatnntttttttttttttttttttttttttttttt

SEQ ID NO: 5003 - DNA, 84 bp, synthetic construct
  source 1..84: mol_type = other DNA
tttttttaagcagtggtatcaacgcagagtacnnggtaggtanngattcgcanntttttttttttttttttttttttttttttt

SEQ ID NO: 5004 - DNA, 84 bp, synthetic construct
  source 1..84: mol_type = other DNA
tttttttaagcagtggtatcaacgcagagtacnnggtaggtanncgatggaanntttttttttttttttttttttttttttttt

SEQ ID NO: 5005 - DNA, 84 bp, synthetic construct
  source 1..84: mol_type = other DNA
tttttttaagcagtggtatcaacgcagagtacnnggtaggtannagcaagganntttttttttttttttttttttttttttttt

SEQ ID NO: 5006 - DNA, 84 bp, synthetic construct
  source 1..84: mol_type = other DNA
tttttttaagcagtggtatcaacgcagagtacnnggtaggtanncgtagcaanntttttttttttttttttttttttttttttt

SEQ ID NO: 5007 - DNA, 84 bp, synthetic construct
  source 1..84: mol_type = other DNA
tttttttaagcagtggtatcaacgcagagtacnnggtaggtanntggcagtanntttttttttttttttttttttttttttttt

SEQ ID NO: 5008 - DNA, 84 bp, synthetic construct
  source 1..84: mol_type = other DNA
tttttttaagcagtggtatcaacgcagagtacnnggtaggtanncggtagttnntttttttttttttttttttttttttttttt

SEQ ID NO: 5009 - DNA, 84 bp, synthetic construct
  source 1..84: mol_type = other DNA
tttttttaagcagtggtatcaacgcagagtacnnggtaggtanntgacttcgnntttttttttttttttttttttttttttttt

SEQ ID NO: 5010 - DNA, 84 bp, synthetic construct
  source 1..84: mol_type = other DNA
tttttttaagcagtggtatcaacgcagagtacnnggtaggtanngagtgcaanntttttttttttttttttttttttttttttt

SEQ ID NO: 5011 - DNA, 84 bp, synthetic construct
  source 1..84: mol_type = other DNA
tttttttaagcagtggtatcaacgcagagtacnnggtaggtannacggtaacnntttttttttttttttttttttttttttttt

SEQ ID NO: 5012 - DNA, 84 bp, synthetic construct
  source 1..84: mol_type = other DNA
tttttttaagcagtggtatcaacgcagagtacnnggtaggtannaagtggtgnntttttttttttttttttttttttttttttt

SEQ ID NO: 5013 - DNA, 84 bp, synthetic construct
  source 1..84: mol_type = other DNA
tttttttaagcagtggtatcaacgcagagtacnnggtaggtannggagacaanntttttttttttttttttttttttttttttt

SEQ ID NO: 5014 - DNA, 84 bp, synthetic construct
  source 1..84: mol_type = other DNA
tttttttaagcagtggtatcaacgcagagtacnnggtaggtanntcaaggacnntttttttttttttttttttttttttttttt

SEQ ID NO: 5015 - DNA, 84 bp, synthetic construct
  source 1..84: mol_type = other DNA
tttttttaagcagtggtatcaacgcagagtacnnggtaggtannaagagagcnntttttttttttttttttttttttttttttt

SEQ ID NO: 5016 - DNA, 84 bp, synthetic construct
  source 1..84: mol_type = other DNA
tttttttaagcagtggtatcaacgcagagtacnnggtaggtanncgagagatnntttttttttttttttttttttttttttttt

SEQ ID NO: 5017 - DNA, 84 bp, synthetic construct
  source 1..84: mol_type = other DNA
tttttttaagcagtggtatcaacgcagagtacnnggtaggtannacagatggnntttttttttttttttttttttttttttttt

SEQ ID NO: 5018 - DNA, 84 bp, synthetic construct
  source 1..84: mol_type = other DNA
tttttttaagcagtggtatcaacgcagagtacnnggtaggtannaggagtcanntttttttttttttttttttttttttttttt

SEQ ID NO: 5019 - DNA, 84 bp, synthetic construct
  source 1..84: mol_type = other DNA
tttttttaagcagtggtatcaacgcagagtacnnggtaggtanncgtgttacnntttttttttttttttttttttttttttttt

SEQ ID NO: 5020 - DNA, 84 bp, synthetic construct
  source 1..84: mol_type = other DNA
tttttttaagcagtggtatcaacgcagagtacnnggtaggtanntagtgtgcnntttttttttttttttttttttttttttttt

SEQ ID NO: 5021 - DNA, 84 bp, synthetic construct
  source 1..84: mol_type = other DNA
tttttttaagcagtggtatcaacgcagagtacnnggtaggtannctcatgacnntttttttttttttttttttttttttttttt

SEQ ID NO: 5022 - DNA, 84 bp, synthetic construct
  source 1..84: mol_type = other DNA
tttttttaagcagtggtatcaacgcagagtacnnggtaggtanngtatccagnntttttttttttttttttttttttttttttt

SEQ ID NO: 5023 - DNA, 84 bp, synthetic construct
  source 1..84: mol_type = other DNA
tttttttaagcagtggtatcaacgcagagtacnnggtaggtannacgcctatnntttttttttttttttttttttttttttttt

SEQ ID NO: 5024 - DNA, 84 bp, synthetic construct
  source 1..84: mol_type = other DNA
tttttttaagcagtggtatcaacgcagagtacnnggtaggtannaacgacctnntttttttttttttttttttttttttttttt

SEQ ID NO: 5025 - DNA, 84 bp, synthetic construct
  source 1..84: mol_type = other DNA
tttttttaagcagtggtatcaacgcagagtacnnggtaggtannatcaggctnntttttttttttttttttttttttttttttt

SEQ ID NO: 5026 - DNA, 84 bp, synthetic construct
  source 1..84: mol_type = other DNA
tttttttaagcagtggtatcaacgcagagtacnnggtaggtanncaagttcgnntttttttttttttttttttttttttttttt

SEQ ID NO: 5027 - DNA, 84 bp, synthetic construct
  source 1..84: mol_type = other DNA
tttttttaagcagtggtatcaacgcagagtacnnggtaggtanntagccaganntttttttttttttttttttttttttttttt

SEQ ID NO: 5028 - DNA, 84 bp, synthetic construct
  source 1..84: mol_type = other DNA
tttttttaagcagtggtatcaacgcagagtacnnggtaggtanncaatcacgnntttttttttttttttttttttttttttttt

SEQ ID NO: 5029 - DNA, 84 bp, synthetic construct
  source 1..84: mol_type = other DNA
tttttttaagcagtggtatcaacgcagagtacnnggtaggtanngcaacaagnntttttttttttttttttttttttttttttt

SEQ ID NO: 5030 - DNA, 84 bp, synthetic construct
  source 1..84: mol_type = other DNA
tttttttaagcagtggtatcaacgcagagtacnnggtaggtanncacgacaanntttttttttttttttttttttttttttttt

SEQ ID NO: 5031 - DNA, 84 bp, synthetic construct
  source 1..84: mol_type = other DNA
tttttttaagcagtggtatcaacgcagagtacnnggtaggtanntacggaganntttttttttttttttttttttttttttttt

SEQ ID NO: 5032 - DNA, 84 bp, synthetic construct
  source 1..84: mol_type = other DNA
tttttttaagcagtggtatcaacgcagagtacnnggtaggtanncgacaaganntttttttttttttttttttttttttttttt

SEQ ID NO: 5033 - DNA, 84 bp, synthetic construct
  source 1..84: mol_type = other DNA
tttttttaagcagtggtatcaacgcagagtacnnggtaggtanncgaagtganntttttttttttttttttttttttttttttt

SEQ ID NO: 5034 - DNA, 84 bp, synthetic construct
  source 1..84: mol_type = other DNA
tttttttaagcagtggtatcaacgcagagtacnnggtaggtannagctggtanntttttttttttttttttttttttttttttt

SEQ ID NO: 5035 - DNA, 84 bp, synthetic construct
  source 1..84: mol_type = other DNA
tttttttaagcagtggtatcaacgcagagtacnnggtaggtannaactaggcnntttttttttttttttttttttttttttttt

SEQ ID NO: 5036 - DNA, 84 bp, synthetic construct
  source 1..84: mol_type = other DNA
tttttttaagcagtggtatcaacgcagagtacnnggtaggtanncagcaagtnntttttttttttttttttttttttttttttt

SEQ ID NO: 5037 - DNA, 84 bp, synthetic construct
  source 1..84: mol_type = other DNA
tttttttaagcagtggtatcaacgcagagtacnnggtaggtannacgaggtanntttttttttttttttttttttttttttttt

SEQ ID NO: 5038 - DNA, 84 bp, synthetic construct
  source 1..84: mol_type = other DNA
tttttttaagcagtggtatcaacgcagagtacnnggtaggtanncatcttccnntttttttttttttttttttttttttttttt

SEQ ID NO: 5039 - DNA, 84 bp, synthetic construct
  source 1..84: mol_type = other DNA
tttttttaagcagtggtatcaacgcagagtacnnggtaggtanncctgaatcnntttttttttttttttttttttttttttttt

SEQ ID NO: 5040 - DNA, 84 bp, synthetic construct
  source 1..84: mol_type = other DNA
tttttttaagcagtggtatcaacgcagagtacnnggtaggtanntgcagactnntttttttttttttttttttttttttttttt

SEQ ID NO: 5041 - DNA, 84 bp, synthetic construct
  source 1..84: mol_type = other DNA
tttttttaagcagtggtatcaacgcagagtacnnggtaggtannagatgtggnntttttttttttttttttttttttttttttt

SEQ ID NO: 5042 - DNA, 84 bp, synthetic construct
  source 1..84: mol_type = other DNA
tttttttaagcagtggtatcaacgcagagtacnnggtaggtannagttcgacnntttttttttttttttttttttttttttttt

SEQ ID NO: 5043 - DNA, 84 bp, synthetic construct
  source 1..84: mol_type = other DNA
tttttttaagcagtggtatcaacgcagagtacnnggtaggtannacaacctcnntttttttttttttttttttttttttttttt

SEQ ID NO: 5044 - DNA, 84 bp, synthetic construct
  source 1..84: mol_type = other DNA
tttttttaagcagtggtatcaacgcagagtacnnggtaggtanncatggtagnntttttttttttttttttttttttttttttt

SEQ ID NO: 5045 - DNA, 84 bp, synthetic construct
  source 1..84: mol_type = other DNA
tttttttaagcagtggtatcaacgcagagtacnnggtaggtanncgtatctcnntttttttttttttttttttttttttttttt

SEQ ID NO: 5046 - DNA, 84 bp, synthetic construct
  source 1..84: mol_type = other DNA
tttttttaagcagtggtatcaacgcagagtacnnggtaggtanncctagttcnntttttttttttttttttttttttttttttt

SEQ ID NO: 5047 - DNA, 84 bp, synthetic construct
  source 1..84: mol_type = other DNA
tttttttaagcagtggtatcaacgcagagtacnnggtaggtanncaagagtcnntttttttttttttttttttttttttttttt

SEQ ID NO: 5048 - DNA, 84 bp, synthetic construct
  source 1..84: mol_type = other DNA
tttttttaagcagtggtatcaacgcagagtacnngacaagtgnnaatcggcanntttttttttttttttttttttttttttttt

SEQ ID NO: 5049 - DNA, 84 bp, synthetic construct
  source 1..84: mol_type = other DNA
tttttttaagcagtggtatcaacgcagagtacnngacaagtgnntacggcatnntttttttttttttttttttttttttttttt

SEQ ID NO: 5050 - DNA, 84 bp, synthetic construct
  source 1..84: mol_type = other DNA
tttttttaagcagtggtatcaacgcagagtacnngacaagtgnnttggatcgnntttttttttttttttttttttttttttttt

SEQ ID NO: 5051 - DNA, 84 bp, synthetic construct
  source 1..84: mol_type = other DNA
tttttttaagcagtggtatcaacgcagagtacnngacaagtgnntggaacganntttttttttttttttttttttttttttttt

SEQ ID NO: 5052 - DNA, 84 bp, synthetic construct
  source 1..84: mol_type = other DNA
tttttttaagcagtggtatcaacgcagagtacnngacaagtgnnggcaatcanntttttttttttttttttttttttttttttt

SEQ ID NO: 5053 - DNA, 84 bp, synthetic construct
  source 1..84: mol_type = other DNA
tttttttaagcagtggtatcaacgcagagtacnngacaagtgnngaatccganntttttttttttttttttttttttttttttt

SEQ ID NO: 5054 - DNA, 84 bp, synthetic construct
  source 1..84: mol_type = other DNA
tttttttaagcagtggtatcaacgcagagtacnngacaagtgnnttacggtgnntttttttttttttttttttttttttttttt

SEQ ID NO: 5055 - DNA, 84 bp, synthetic construct
  source 1..84: mol_type = other DNA
tttttttaagcagtggtatcaacgcagagtacnngacaagtgnncatatcggnntttttttttttttttttttttttttttttt

SEQ ID NO: 5056 - DNA, 84 bp, synthetic construct
  source 1..84: mol_type = other DNA
tttttttaagcagtggtatcaacgcagagtacnngacaagtgnncttcggtanntttttttttttttttttttttttttttttt

SEQ ID NO: 5057 - DNA, 84 bp, synthetic construct
  source 1..84: mol_type = other DNA
tttttttaagcagtggtatcaacgcagagtacnngacaagtgnntcctaacgnntttttttttttttttttttttttttttttt

SEQ ID NO: 5058 - DNA, 84 bp, synthetic construct
  source 1..84: mol_type = other DNA
tttttttaagcagtggtatcaacgcagagtacnngacaagtgnngtaagccanntttttttttttttttttttttttttttttt

SEQ ID NO: 5059 - DNA, 84 bp, synthetic construct
  source 1..84: mol_type = other DNA
tttttttaagcagtggtatcaacgcagagtacnngacaagtgnntaaggtggnntttttttttttttttttttttttttttttt

SEQ ID NO: 5060 - DNA, 84 bp, synthetic construct
  source 1..84: mol_type = other DNA
tttttttaagcagtggtatcaacgcagagtacnngacaagtgnnggtaagctnntttttttttttttttttttttttttttttt

SEQ ID NO: 5061 - DNA, 84 bp, synthetic construct
  source 1..84: mol_type = other DNA
tttttttaagcagtggtatcaacgcagagtacnngacaagtgnntgtgtcganntttttttttttttttttttttttttttttt

SEQ ID NO: 5062 - DNA, 84 bp, synthetic construct
  source 1..84: mol_type = other DNA
tttttttaagcagtggtatcaacgcagagtacnngacaagtgnngagcatganntttttttttttttttttttttttttttttt

SEQ ID NO: 5063 - DNA, 84 bp, synthetic construct
  source 1..84: mol_type = other DNA
tttttttaagcagtggtatcaacgcagagtacnngacaagtgnntcgaagtcnntttttttttttttttttttttttttttttt

SEQ ID NO: 5064 - DNA, 84 bp, synthetic construct
  source 1..84: mol_type = other DNA
tttttttaagcagtggtatcaacgcagagtacnngacaagtgnnggtgaacanntttttttttttttttttttttttttttttt

SEQ ID NO: 5065 - DNA, 84 bp, synthetic construct
  source 1..84: mol_type = other DNA
tttttttaagcagtggtatcaacgcagagtacnngacaagtgnnacatgcacnntttttttttttttttttttttttttttttt

SEQ ID NO: 5066 - DNA, 84 bp, synthetic construct
  source 1..84: mol_type = other DNA
tttttttaagcagtggtatcaacgcagagtacnngacaagtgnnccaacagtnntttttttttttttttttttttttttttttt

SEQ ID NO: 5067 - DNA, 84 bp, synthetic construct
  source 1..84: mol_type = other DNA
tttttttaagcagtggtatcaacgcagagtacnngacaagtgnnagaacagcnntttttttttttttttttttttttttttttt

SEQ ID NO: 5068 - DNA, 84 bp, synthetic construct
  source 1..84: mol_type = other DNA
tttttttaagcagtggtatcaacgcagagtacnngacaagtgnngaacacgtnntttttttttttttttttttttttttttttt

SEQ ID NO: 5069 - DNA, 84 bp, synthetic construct
  source 1..84: mol_type = other DNA
tttttttaagcagtggtatcaacgcagagtacnngacaagtgnnggtcttcanntttttttttttttttttttttttttttttt

SEQ ID NO: 5070 - DNA, 84 bp, synthetic construct
  source 1..84: mol_type = other DNA
tttttttaagcagtggtatcaacgcagagtacnngacaagtgnnaggttcagnntttttttttttttttttttttttttttttt

SEQ ID NO: 5071 - DNA, 84 bp, synthetic construct
  source 1..84: mol_type = other DNA
tttttttaagcagtggtatcaacgcagagtacnngacaagtgnnctagagcanntttttttttttttttttttttttttttttt

SEQ ID NO: 5072 - DNA, 84 bp, synthetic construct
  source 1..84: mol_type = other DNA
tttttttaagcagtggtatcaacgcagagtacnngacaagtgnncttctagcnntttttttttttttttttttttttttttttt

SEQ ID NO: 5073 - DNA, 84 bp, synthetic construct
  source 1..84: mol_type = other DNA
tttttttaagcagtggtatcaacgcagagtacnngacaagtgnngagtaacgnntttttttttttttttttttttttttttttt

SEQ ID NO: 5074 - DNA, 84 bp, synthetic construct
  source 1..84: mol_type = other DNA
tttttttaagcagtggtatcaacgcagagtacnngacaagtgnnctaagaggnntttttttttttttttttttttttttttttt

SEQ ID NO: 5075 - DNA, 84 bp, synthetic construct
  source 1..84: mol_type = other DNA
tttttttaagcagtggtatcaacgcagagtacnngacaagtgnnacgtgtagnntttttttttttttttttttttttttttttt

SEQ ID NO: 5076 - DNA, 84 bp, synthetic construct
  source 1..84: mol_type = other DNA
tttttttaagcagtggtatcaacgcagagtacnngacaagtgnnactacaggnntttttttttttttttttttttttttttttt

SEQ ID NO: 5077 - DNA, 84 bp, synthetic construct
  source 1..84: mol_type = other DNA
tttttttaagcagtggtatcaacgcagagtacnngacaagtgnntacaggtcnntttttttttttttttttttttttttttttt

SEQ ID NO: 5078 - DNA, 84 bp, synthetic construct
  source 1..84: mol_type = other DNA
tttttttaagcagtggtatcaacgcagagtacnngacaagtgnnctcacatgnntttttttttttttttttttttttttttttt

SEQ ID NO: 5079 - DNA, 84 bp, synthetic construct
  source 1..84: mol_type = other DNA
tttttttaagcagtggtatcaacgcagagtacnngacaagtgnnactaggagnntttttttttttttttttttttttttttttt

SEQ ID NO: 5080 - DNA, 84 bp, synthetic construct
  source 1..84: mol_type = other DNA
tttttttaagcagtggtatcaacgcagagtacnngacaagtgnnccatagganntttttttttttttttttttttttttttttt

SEQ ID NO: 5081 - DNA, 84 bp, synthetic construct
  source 1..84: mol_type = other DNA
tttttttaagcagtggtatcaacgcagagtacnngacaagtgnnggagaatcnntttttttttttttttttttttttttttttt

SEQ ID NO: 5082 - DNA, 84 bp, synthetic construct
  source 1..84: mol_type = other DNA
tttttttaagcagtggtatcaacgcagagtacnngacaagtgnngccaagaanntttttttttttttttttttttttttttttt

SEQ ID NO: 5083 - DNA, 84 bp, synthetic construct
  source 1..84: mol_type = other DNA
tttttttaagcagtggtatcaacgcagagtacnngacaagtgnnaaggcaagnntttttttttttttttttttttttttttttt

SEQ ID NO: 5084 - DNA, 84 bp, synthetic construct
  source 1..84: mol_type = other DNA
tttttttaagcagtggtatcaacgcagagtacnngacaagtgnnaatgtcgcnntttttttttttttttttttttttttttttt

SEQ ID NO: 5085 - DNA, 84 bp, synthetic construct
  source 1..84: mol_type = other DNA
tttttttaagcagtggtatcaacgcagagtacnngacaagtgnnatggaaccnntttttttttttttttttttttttttttttt

SEQ ID NO: 5086 - DNA, 84 bp, synthetic construct
  source 1..84: mol_type = other DNA
tttttttaagcagtggtatcaacgcagagtacnngacaagtgnnagaggcatnntttttttttttttttttttttttttttttt

SEQ ID NO: 5087 - DNA, 84 bp, synthetic construct
  source 1..84: mol_type = other DNA
tttttttaagcagtggtatcaacgcagagtacnngacaagtgnntgcatagcnntttttttttttttttttttttttttttttt

SEQ ID NO: 5088 - DNA, 84 bp, synthetic construct
  source 1..84: mol_type = other DNA
tttttttaagcagtggtatcaacgcagagtacnngacaagtgnnctaacgganntttttttttttttttttttttttttttttt

SEQ ID NO: 5089 - DNA, 84 bp, synthetic construct
  source 1..84: mol_type = other DNA
tttttttaagcagtggtatcaacgcagagtacnngacaagtgnntatcgaggnntttttttttttttttttttttttttttttt

SEQ ID NO: 5090 - DNA, 84 bp, synthetic construct
  source 1..84: mol_type = other DNA
tttttttaagcagtggtatcaacgcagagtacnngacaagtgnncatagcctnntttttttttttttttttttttttttttttt

SEQ ID NO: 5091 - DNA, 84 bp, synthetic construct
  source 1..84: mol_type = other DNA
tttttttaagcagtggtatcaacgcagagtacnngacaagtgnnatcgagacnntttttttttttttttttttttttttttttt

SEQ ID NO: 5092 - DNA, 84 bp, synthetic construct
  source 1..84: mol_type = other DNA
tttttttaagcagtggtatcaacgcagagtacnngacaagtgnnggaagagtnntttttttttttttttttttttttttttttt

SEQ ID NO: 5093 - DNA, 84 bp, synthetic construct
  source 1..84: mol_type = other DNA
tttttttaagcagtggtatcaacgcagagtacnngacaagtgnnccaagtagnntttttttttttttttttttttttttttttt

SEQ ID NO: 5094 - DNA, 84 bp, synthetic construct
  source 1..84: mol_type = other DNA
tttttttaagcagtggtatcaacgcagagtacnngacaagtgnnctgaacagnntttttttttttttttttttttttttttttt

SEQ ID NO: 5095 - DNA, 84 bp, synthetic construct
  source 1..84: mol_type = other DNA
tttttttaagcagtggtatcaacgcagagtacnngacaagtgnngtaggttcnntttttttttttttttttttttttttttttt

SEQ ID NO: 5096 - DNA, 84 bp, synthetic construct
  source 1..84: mol_type = other DNA
tttttttaagcagtggtatcaacgcagagtacnngacaagtgnngtatggacnntttttttttttttttttttttttttttttt

SEQ ID NO: 5097 - DNA, 84 bp, synthetic construct
  source 1..84: mol_type = other DNA
tttttttaagcagtggtatcaacgcagagtacnngacaagtgnntcgcaacanntttttttttttttttttttttttttttttt

SEQ ID NO: 5098 - DNA, 84 bp, synthetic construct
  source 1..84: mol_type = other DNA
tttttttaagcagtggtatcaacgcagagtacnngacaagtgnnccgctaatnntttttttttttttttttttttttttttttt

SEQ ID NO: 5099 - DNA, 84 bp, synthetic construct
  source 1..84: mol_type = other DNA
tttttttaagcagtggtatcaacgcagagtacnngacaagtgnngattcgcanntttttttttttttttttttttttttttttt

SEQ ID NO: 5100 - DNA, 84 bp, synthetic construct
  source 1..84: mol_type = other DNA
tttttttaagcagtggtatcaacgcagagtacnngacaagtgnncgatggaanntttttttttttttttttttttttttttttt

SEQ ID NO: 5101 - DNA, 84 bp, synthetic construct
  source 1..84: mol_type = other DNA
tttttttaagcagtggtatcaacgcagagtacnngacaagtgnnagcaagganntttttttttttttttttttttttttttttt

SEQ ID NO: 5102 - DNA, 84 bp, synthetic construct
  source 1..84: mol_type = other DNA
tttttttaagcagtggtatcaacgcagagtacnngacaagtgnncgtagcaanntttttttttttttttttttttttttttttt

SEQ ID NO: 5103 - DNA, 84 bp, synthetic construct
  source 1..84: mol_type = other DNA
tttttttaagcagtggtatcaacgcagagtacnngacaagtgnntggcagtanntttttttttttttttttttttttttttttt

SEQ ID NO: 5104 - DNA, 84 bp, synthetic construct
  source 1..84: mol_type = other DNA
tttttttaagcagtggtatcaacgcagagtacnngacaagtgnncggtagttnntttttttttttttttttttttttttttttt

SEQ ID NO: 5105 - DNA, 84 bp, synthetic construct
  source 1..84: mol_type = other DNA
tttttttaagcagtggtatcaacgcagagtacnngacaagtgnntgacttcgnntttttttttttttttttttttttttttttt

SEQ ID NO: 5106 - DNA, 84 bp, synthetic construct
  source 1..84: mol_type = other DNA
tttttttaagcagtggtatcaacgcagagtacnngacaagtgnngagtgcaanntttttttttttttttttttttttttttttt

SEQ ID NO: 5107 - DNA, 84 bp, synthetic construct
  source 1..84: mol_type = other DNA
tttttttaagcagtggtatcaacgcagagtacnngacaagtgnnacggtaacnntttttttttttttttttttttttttttttt

SEQ ID NO: 5108 - DNA, 84 bp, synthetic construct
  source 1..84: mol_type = other DNA
tttttttaagcagtggtatcaacgcagagtacnngacaagtgnnaagtggtgnntttttttttttttttttttttttttttttt

SEQ ID NO: 5109 - DNA, 84 bp, synthetic construct
  source 1..84: mol_type = other DNA
tttttttaagcagtggtatcaacgcagagtacnngacaagtgnnggagacaanntttttttttttttttttttttttttttttt

SEQ ID NO: 5110 - DNA, 84 bp, synthetic construct
  source 1..84: mol_type = other DNA
tttttttaagcagtggtatcaacgcagagtacnngacaagtgnntcaaggacnntttttttttttttttttttttttttttttt

SEQ ID NO: 5111 - DNA, 84 bp, synthetic construct
  source 1..84: mol_type = other DNA
tttttttaagcagtggtatcaacgcagagtacnngacaagtgnnaagagagcnntttttttttttttttttttttttttttttt

SEQ ID NO: 5112 - DNA, 84 bp, synthetic construct
  source 1..84: mol_type = other DNA
tttttttaagcagtggtatcaacgcagagtacnngacaagtgnncgagagatnntttttttttttttttttttttttttttttt

SEQ ID NO: 5113 - DNA, 84 bp, synthetic construct
  source 1..84: mol_type = other DNA
tttttttaagcagtggtatcaacgcagagtacnngacaagtgnnacagatggnntttttttttttttttttttttttttttttt

SEQ ID NO: 5114 - DNA, 84 bp, synthetic construct
  source 1..84: mol_type = other DNA
tttttttaagcagtggtatcaacgcagagtacnngacaagtgnnaggagtcanntttttttttttttttttttttttttttttt

SEQ ID NO: 5115 - DNA, 84 bp, synthetic construct
  source 1..84: mol_type = other DNA
tttttttaagcagtggtatcaacgcagagtacnngacaagtgnncgtgttacnntttttttttttttttttttttttttttttt

SEQ ID NO: 5116 - DNA, 84 bp, synthetic construct
  source 1..84: mol_type = other DNA
tttttttaagcagtggtatcaacgcagagtacnngacaagtgnntagtgtgcnntttttttttttttttttttttttttttttt

SEQ ID NO: 5117 - DNA, 84 bp, synthetic construct
  source 1..84: mol_type = other DNA
tttttttaagcagtggtatcaacgcagagtacnngacaagtgnnctcatgacnntttttttttttttttttttttttttttttt

SEQ ID NO: 5118 - DNA, 84 bp, synthetic construct
  source 1..84: mol_type = other DNA
tttttttaagcagtggtatcaacgcagagtacnngacaagtgnngtatccagnntttttttttttttttttttttttttttttt

SEQ ID NO: 5119 - DNA, 84 bp, synthetic construct
  source 1..84: mol_type = other DNA
tttttttaagcagtggtatcaacgcagagtacnngacaagtgnnacgcctatnntttttttttttttttttttttttttttttt

SEQ ID NO: 5120 - DNA, 84 bp, synthetic construct
  source 1..84: mol_type = other DNA
tttttttaagcagtggtatcaacgcagagtacnngacaagtgnnaacgacctnntttttttttttttttttttttttttttttt

SEQ ID NO: 5121 - DNA, 84 bp, synthetic construct
  source 1..84: mol_type = other DNA
tttttttaagcagtggtatcaacgcagagtacnngacaagtgnnatcaggctnntttttttttttttttttttttttttttttt

SEQ ID NO: 5122 - DNA, 84 bp, synthetic construct
  source 1..84: mol_type = other DNA
tttttttaagcagtggtatcaacgcagagtacnngacaagtgnncaagttcgnntttttttttttttttttttttttttttttt

SEQ ID NO: 5123 - DNA, 84 bp, synthetic construct
  source 1..84: mol_type = other DNA
tttttttaagcagtggtatcaacgcagagtacnngacaagtgnntagccaganntttttttttttttttttttttttttttttt

SEQ ID NO: 5124 - DNA, 84 bp, synthetic construct
  source 1..84: mol_type = other DNA
tttttttaagcagtggtatcaacgcagagtacnngacaagtgnncaatcacgnntttttttttttttttttttttttttttttt

SEQ ID NO: 5125 - DNA, 84 bp, synthetic construct
  source 1..84: mol_type = other DNA
tttttttaagcagtggtatcaacgcagagtacnngacaagtgnngcaacaagnntttttttttttttttttttttttttttttt

SEQ ID NO: 5126 - DNA, 84 bp, synthetic construct
  source 1..84: mol_type = other DNA
tttttttaagcagtggtatcaacgcagagtacnngacaagtgnncacgacaanntttttttttttttttttttttttttttttt

SEQ ID NO: 5127 - DNA, 84 bp, synthetic construct
  source 1..84: mol_type = other DNA
tttttttaagcagtggtatcaacgcagagtacnngacaagtgnntacggaganntttttttttttttttttttttttttttttt

SEQ ID NO: 5128 - DNA, 84 bp, synthetic construct
  source 1..84: mol_type = other DNA
tttttttaagcagtggtatcaacgcagagtacnngacaagtgnncgacaaganntttttttttttttttttttttttttttttt

SEQ ID NO: 5129 - DNA, 84 bp, synthetic construct
  source 1..84: mol_type = other DNA
tttttttaagcagtggtatcaacgcagagtacnngacaagtgnncgaagtganntttttttttttttttttttttttttttttt

SEQ ID NO: 5130 - DNA, 84 bp, synthetic construct
  source 1..84: mol_type = other DNA
tttttttaagcagtggtatcaacgcagagtacnngacaagtgnnagctggtanntttttttttttttttttttttttttttttt

SEQ ID NO: 5131 - DNA, 84 bp, synthetic construct
  source 1..84: mol_type = other DNA
tttttttaagcagtggtatcaacgcagagtacnngacaagtgnnaactaggcnntttttttttttttttttttttttttttttt

SEQ ID NO: 5132 - DNA, 84 bp, synthetic construct
  source 1..84: mol_type = other DNA
tttttttaagcagtggtatcaacgcagagtacnngacaagtgnncagcaagtnntttttttttttttttttttttttttttttt

SEQ ID NO: 5133 - DNA, 84 bp, synthetic construct
  source 1..84: mol_type = other DNA
tttttttaagcagtggtatcaacgcagagtacnngacaagtgnnacgaggtanntttttttttttttttttttttttttttttt

SEQ ID NO: 5134 - DNA, 84 bp, synthetic construct
  source 1..84: mol_type = other DNA
tttttttaagcagtggtatcaacgcagagtacnngacaagtgnncatcttccnntttttttttttttttttttttttttttttt

SEQ ID NO: 5135 - DNA, 84 bp, synthetic construct
  source 1..84: mol_type = other DNA
tttttttaagcagtggtatcaacgcagagtacnngacaagtgnncctgaatcnntttttttttttttttttttttttttttttt

SEQ ID NO: 5136 - DNA, 84 bp, synthetic construct
  source 1..84: mol_type = other DNA
tttttttaagcagtggtatcaacgcagagtacnngacaagtgnntgcagactnntttttttttttttttttttttttttttttt

SEQ ID NO: 5137 - DNA, 84 bp, synthetic construct
  source 1..84: mol_type = other DNA
tttttttaagcagtggtatcaacgcagagtacnngacaagtgnnagatgtggnntttttttttttttttttttttttttttttt

SEQ ID NO: 5138 - DNA, 84 bp, synthetic construct
  source 1..84: mol_type = other DNA
tttttttaagcagtggtatcaacgcagagtacnngacaagtgnnagttcgacnntttttttttttttttttttttttttttttt

SEQ ID NO: 5139 - DNA, 84 bp, synthetic construct
  source 1..84: mol_type = other DNA
tttttttaagcagtggtatcaacgcagagtacnngacaagtgnnacaacctcnntttttttttttttttttttttttttttttt

SEQ ID NO: 5140 - DNA, 84 bp, synthetic construct
  source 1..84: mol_type = other DNA
tttttttaagcagtggtatcaacgcagagtacnngacaagtgnncatggtagnntttttttttttttttttttttttttttttt

SEQ ID NO: 5141 - DNA, 84 bp, synthetic construct
  source 1..84: mol_type = other DNA
tttttttaagcagtggtatcaacgcagagtacnngacaagtgnncgtatctcnntttttttttttttttttttttttttttttt

SEQ ID NO: 5142 - DNA, 84 bp, synthetic construct
  source 1..84: mol_type = other DNA
tttttttaagcagtggtatcaacgcagagtacnngacaagtgnncctagttcnntttttttttttttttttttttttttttttt

SEQ ID NO: 5143 - DNA, 84 bp, synthetic construct
  source 1..84: mol_type = other DNA
tttttttaagcagtggtatcaacgcagagtacnngacaagtgnncaagagtcnntttttttttttttttttttttttttttttt

SEQ ID NO: 5144 - DNA, 84 bp, synthetic construct
  source 1..84: mol_type = other DNA
tttttttaagcagtggtatcaacgcagagtacnntaggaagcnnaatcggcanntttttttttttttttttttttttttttttt

SEQ ID NO: 5145 - DNA, 84 bp, synthetic construct
  source 1..84: mol_type = other DNA
tttttttaagcagtggtatcaacgcagagtacnntaggaagcnntacggcatnntttttttttttttttttttttttttttttt

SEQ ID NO: 5146 - DNA, 84 bp, synthetic construct
  source 1..84: mol_type = other DNA
tttttttaagcagtggtatcaacgcagagtacnntaggaagcnnttggatcgnntttttttttttttttttttttttttttttt

SEQ ID NO: 5147 - DNA, 84 bp, synthetic construct
  source 1..84: mol_type = other DNA
tttttttaagcagtggtatcaacgcagagtacnntaggaagcnntggaacganntttttttttttttttttttttttttttttt

SEQ ID NO: 5148 - DNA, 84 bp, synthetic construct
  source 1..84: mol_type = other DNA
tttttttaagcagtggtatcaacgcagagtacnntaggaagcnnggcaatcanntttttttttttttttttttttttttttttt

SEQ ID NO: 5149 - DNA, 84 bp, synthetic construct
  source 1..84: mol_type = other DNA
tttttttaagcagtggtatcaacgcagagtacnntaggaagcnngaatccganntttttttttttttttttttttttttttttt

SEQ ID NO: 5150 - DNA, 84 bp, synthetic construct
  source 1..84: mol_type = other DNA
tttttttaagcagtggtatcaacgcagagtacnntaggaagcnnttacggtgnntttttttttttttttttttttttttttttt

SEQ ID NO: 5151 - DNA, 84 bp, synthetic construct
  source 1..84: mol_type = other DNA
tttttttaagcagtggtatcaacgcagagtacnntaggaagcnncatatcggnntttttttttttttttttttttttttttttt

SEQ ID NO: 5152 - DNA, 84 bp, synthetic construct
  source 1..84: mol_type = other DNA
tttttttaagcagtggtatcaacgcagagtacnntaggaagcnncttcggtanntttttttttttttttttttttttttttttt

SEQ ID NO: 5153 - DNA, 84 bp, synthetic construct
  source 1..84: mol_type = other DNA
tttttttaagcagtggtatcaacgcagagtacnntaggaagcnntcctaacgnntttttttttttttttttttttttttttttt

SEQ ID NO: 5154 - DNA, 84 bp, synthetic construct
  source 1..84: mol_type = other DNA
tttttttaagcagtggtatcaacgcagagtacnntaggaagcnngtaagccanntttttttttttttttttttttttttttttt

SEQ ID NO: 5155 - DNA, 84 bp, synthetic construct
  source 1..84: mol_type = other DNA
tttttttaagcagtggtatcaacgcagagtacnntaggaagcnntaaggtggnntttttttttttttttttttttttttttttt

SEQ ID NO: 5156 - DNA, 84 bp, synthetic construct
  source 1..84: mol_type = other DNA
tttttttaagcagtggtatcaacgcagagtacnntaggaagcnnggtaagctnntttttttttttttttttttttttttttttt

SEQ ID NO: 5157 - DNA, 84 bp, synthetic construct
  source 1..84: mol_type = other DNA
tttttttaagcagtggtatcaacgcagagtacnntaggaagcnntgtgtcganntttttttttttttttttttttttttttttt

SEQ ID NO: 5158 - DNA, 84 bp, synthetic construct
  source 1..84: mol_type = other DNA
tttttttaagcagtggtatcaacgcagagtacnntaggaagcnngagcatganntttttttttttttttttttttttttttttt

SEQ ID NO: 5159 - DNA, 84 bp, synthetic construct
  source 1..84: mol_type = other DNA
tttttttaagcagtggtatcaacgcagagtacnntaggaagcnntcgaagtcnntttttttttttttttttttttttttttttt

SEQ ID NO: 5160 - DNA, 84 bp, synthetic construct
  source 1..84: mol_type = other DNA
tttttttaagcagtggtatcaacgcagagtacnntaggaagcnnggtgaacanntttttttttttttttttttttttttttttt

SEQ ID NO: 5161 - DNA, 84 bp, synthetic construct
  source 1..84: mol_type = other DNA
tttttttaagcagtggtatcaacgcagagtacnntaggaagcnnacatgcacnntttttttttttttttttttttttttttttt

SEQ ID NO: 5162 - DNA, 84 bp, synthetic construct
  source 1..84: mol_type = other DNA
tttttttaagcagtggtatcaacgcagagtacnntaggaagcnnccaacagtnntttttttttttttttttttttttttttttt

SEQ ID NO: 5163 - DNA, 84 bp, synthetic construct
  source 1..84: mol_type = other DNA
tttttttaagcagtggtatcaacgcagagtacnntaggaagcnnagaacagcnntttttttttttttttttttttttttttttt

SEQ ID NO: 5164 - DNA, 84 bp, synthetic construct
  source 1..84: mol_type = other DNA
tttttttaagcagtggtatcaacgcagagtacnntaggaagcnngaacacgtnntttttttttttttttttttttttttttttt

SEQ ID NO: 5165 - DNA, 84 bp, synthetic construct
  source 1..84: mol_type = other DNA
tttttttaagcagtggtatcaacgcagagtacnntaggaagcnnggtcttcanntttttttttttttttttttttttttttttt

SEQ ID NO: 5166 - DNA, 84 bp, synthetic construct
  source 1..84: mol_type = other DNA
tttttttaagcagtggtatcaacgcagagtacnntaggaagcnnaggttcagnntttttttttttttttttttttttttttttt

SEQ ID NO: 5167 - DNA, 84 bp, synthetic construct
  source 1..84: mol_type = other DNA
tttttttaagcagtggtatcaacgcagagtacnntaggaagcnnctagagcanntttttttttttttttttttttttttttttt

SEQ ID NO: 5168 - DNA, 84 bp, synthetic construct
  source 1..84: mol_type = other DNA
tttttttaagcagtggtatcaacgcagagtacnntaggaagcnncttctagcnntttttttttttttttttttttttttttttt

SEQ ID NO: 5169 - DNA, 84 bp, synthetic construct
  source 1..84: mol_type = other DNA
tttttttaagcagtggtatcaacgcagagtacnntaggaagcnngagtaacgnntttttttttttttttttttttttttttttt

SEQ ID NO: 5170 - DNA, 84 bp, synthetic construct
  source 1..84: mol_type = other DNA
tttttttaagcagtggtatcaacgcagagtacnntaggaagcnnctaagaggnntttttttttttttttttttttttttttttt

SEQ ID NO: 5171 - DNA, 84 bp, synthetic construct
  source 1..84: mol_type = other DNA
tttttttaagcagtggtatcaacgcagagtacnntaggaagcnnacgtgtagnntttttttttttttttttttttttttttttt

SEQ ID NO: 5172 - DNA, 84 bp, synthetic construct
  source 1..84: mol_type = other DNA
tttttttaagcagtggtatcaacgcagagtacnntaggaagcnnactacaggnntttttttttttttttttttttttttttttt

SEQ ID NO: 5173 - DNA, 84 bp, synthetic construct
  source 1..84: mol_type = other DNA
tttttttaagcagtggtatcaacgcagagtacnntaggaagcnntacaggtcnntttttttttttttttttttttttttttttt

SEQ ID NO: 5174 - DNA, 84 bp, synthetic construct
  source 1..84: mol_type = other DNA
tttttttaagcagtggtatcaacgcagagtacnntaggaagcnnctcacatgnntttttttttttttttttttttttttttttt

SEQ ID NO: 5175 - DNA, 84 bp, synthetic construct
  source 1..84: mol_type = other DNA
tttttttaagcagtggtatcaacgcagagtacnntaggaagcnnactaggagnntttttttttttttttttttttttttttttt

SEQ ID NO: 5176 - DNA, 84 bp, synthetic construct
  source 1..84: mol_type = other DNA
tttttttaagcagtggtatcaacgcagagtacnntaggaagcnnccatagganntttttttttttttttttttttttttttttt

SEQ ID NO: 5177 - DNA, 84 bp, synthetic construct
  source 1..84: mol_type = other DNA
tttttttaagcagtggtatcaacgcagagtacnntaggaagcnnggagaatcnntttttttttttttttttttttttttttttt

SEQ ID NO: 5178 - DNA, 84 bp, synthetic construct
  source 1..84: mol_type = other DNA
tttttttaagcagtggtatcaacgcagagtacnntaggaagcnngccaagaanntttttttttttttttttttttttttttttt

SEQ ID NO: 5179 - DNA, 84 bp, synthetic construct
  source 1..84: mol_type = other DNA
tttttttaagcagtggtatcaacgcagagtacnntaggaagcnnaaggcaagnntttttttttttttttttttttttttttttt

SEQ ID NO: 5180 - DNA, 84 bp, synthetic construct
  source 1..84: mol_type = other DNA
tttttttaagcagtggtatcaacgcagagtacnntaggaagcnnaatgtcgcnntttttttttttttttttttttttttttttt

SEQ ID NO: 5181 - DNA, 84 bp, synthetic construct
  source 1..84: mol_type = other DNA
tttttttaagcagtggtatcaacgcagagtacnntaggaagcnnatggaaccnntttttttttttttttttttttttttttttt

SEQ ID NO: 5182 - DNA, 84 bp, synthetic construct
  source 1..84: mol_type = other DNA
tttttttaagcagtggtatcaacgcagagtacnntaggaagcnnagaggcatnntttttttttttttttttttttttttttttt

SEQ ID NO: 5183 - DNA, 84 bp, synthetic construct
  source 1..84: mol_type = other DNA
tttttttaagcagtggtatcaacgcagagtacnntaggaagcnntgcatagcnntttttttttttttttttttttttttttttt

SEQ ID NO: 5184 - DNA, 84 bp, synthetic construct
  source 1..84: mol_type = other DNA
tttttttaagcagtggtatcaacgcagagtacnntaggaagcnnctaacgganntttttttttttttttttttttttttttttt

SEQ ID NO: 5185 - DNA, 84 bp, synthetic construct
  source 1..84: mol_type = other DNA
tttttttaagcagtggtatcaacgcagagtacnntaggaagcnntatcgaggnntttttttttttttttttttttttttttttt

SEQ ID NO: 5186 - DNA, 84 bp, synthetic construct
  source 1..84: mol_type = other DNA
tttttttaagcagtggtatcaacgcagagtacnntaggaagcnncatagcctnntttttttttttttttttttttttttttttt

SEQ ID NO: 5187 - DNA, 84 bp, synthetic construct
  source 1..84: mol_type = other DNA
tttttttaagcagtggtatcaacgcagagtacnntaggaagcnnatcgagacnntttttttttttttttttttttttttttttt

SEQ ID NO: 5188 - DNA, 84 bp, synthetic construct
  source 1..84: mol_type = other DNA
tttttttaagcagtggtatcaacgcagagtacnntaggaagcnnggaagagtnntttttttttttttttttttttttttttttt

SEQ ID NO: 5189 - DNA, 84 bp, synthetic construct
  source 1..84: mol_type = other DNA
tttttttaagcagtggtatcaacgcagagtacnntaggaagcnnccaagtagnntttttttttttttttttttttttttttttt

SEQ ID NO: 5190 - DNA, 84 bp, synthetic construct
  source 1..84: mol_type = other DNA
tttttttaagcagtggtatcaacgcagagtacnntaggaagcnnctgaacagnntttttttttttttttttttttttttttttt

SEQ ID NO: 5191 - DNA, 84 bp, synthetic construct
  source 1..84: mol_type = other DNA
tttttttaagcagtggtatcaacgcagagtacnntaggaagcnngtaggttcnntttttttttttttttttttttttttttttt

SEQ ID NO: 5192 - DNA, 84 bp, synthetic construct
  source 1..84: mol_type = other DNA
tttttttaagcagtggtatcaacgcagagtacnntaggaagcnngtatggacnntttttttttttttttttttttttttttttt

SEQ ID NO: 5193 - DNA, 84 bp, synthetic construct
  source 1..84: mol_type = other DNA
tttttttaagcagtggtatcaacgcagagtacnntaggaagcnntcgcaacanntttttttttttttttttttttttttttttt

SEQ ID NO: 5194 - DNA, 84 bp, synthetic construct
  source 1..84: mol_type = other DNA
tttttttaagcagtggtatcaacgcagagtacnntaggaagcnnccgctaatnntttttttttttttttttttttttttttttt

SEQ ID NO: 5195 - DNA, 84 bp, synthetic construct
  source 1..84: mol_type = other DNA
tttttttaagcagtggtatcaacgcagagtacnntaggaagcnngattcgcanntttttttttttttttttttttttttttttt

SEQ ID NO: 5196 - DNA, 84 bp, synthetic construct
  source 1..84: mol_type = other DNA
tttttttaagcagtggtatcaacgcagagtacnntaggaagcnncgatggaanntttttttttttttttttttttttttttttt

SEQ ID NO: 5197 - DNA, 84 bp, synthetic construct
  source 1..84: mol_type = other DNA
tttttttaagcagtggtatcaacgcagagtacnntaggaagcnnagcaagganntttttttttttttttttttttttttttttt

SEQ ID NO: 5198 - DNA, 84 bp, synthetic construct
  source 1..84: mol_type = other DNA
tttttttaagcagtggtatcaacgcagagtacnntaggaagcnncgtagcaanntttttttttttttttttttttttttttttt

SEQ ID NO: 5199 - DNA, 84 bp, synthetic construct
  source 1..84: mol_type = other DNA
tttttttaagcagtggtatcaacgcagagtacnntaggaagcnntggcagtanntttttttttttttttttttttttttttttt

SEQ ID NO: 5200 - DNA, 84 bp, synthetic construct
  source 1..84: mol_type = other DNA
tttttttaagcagtggtatcaacgcagagtacnntaggaagcnncggtagttnntttttttttttttttttttttttttttttt

SEQ ID NO: 5201 - DNA, 84 bp, synthetic construct
  source 1..84: mol_type = other DNA
tttttttaagcagtggtatcaacgcagagtacnntaggaagcnntgacttcgnntttttttttttttttttttttttttttttt

SEQ ID NO: 5202 - DNA, 84 bp, synthetic construct
  source 1..84: mol_type = other DNA
tttttttaagcagtggtatcaacgcagagtacnntaggaagcnngagtgcaanntttttttttttttttttttttttttttttt

SEQ ID NO: 5203 - DNA, 84 bp, synthetic construct
  source 1..84: mol_type = other DNA
tttttttaagcagtggtatcaacgcagagtacnntaggaagcnnacggtaacnntttttttttttttttttttttttttttttt

SEQ ID NO: 5204 - DNA, 84 bp, synthetic construct
  source 1..84: mol_type = other DNA
tttttttaagcagtggtatcaacgcagagtacnntaggaagcnnaagtggtgnntttttttttttttttttttttttttttttt

SEQ ID NO: 5205 - DNA, 84 bp, synthetic construct
  source 1..84: mol_type = other DNA
tttttttaagcagtggtatcaacgcagagtacnntaggaagcnnggagacaanntttttttttttttttttttttttttttttt

SEQ ID NO: 5206 - DNA, 84 bp, synthetic construct
  source 1..84: mol_type = other DNA
tttttttaagcagtggtatcaacgcagagtacnntaggaagcnntcaaggacnntttttttttttttttttttttttttttttt

SEQ ID NO: 5207 - DNA, 84 bp, synthetic construct
  source 1..84: mol_type = other DNA
tttttttaagcagtggtatcaacgcagagtacnntaggaagcnnaagagagcnntttttttttttttttttttttttttttttt

SEQ ID NO: 5208 - DNA, 84 bp, synthetic construct
  source 1..84: mol_type = other DNA
tttttttaagcagtggtatcaacgcagagtacnntaggaagcnncgagagatnntttttttttttttttttttttttttttttt

SEQ ID NO: 5209 - DNA, 84 bp, synthetic construct
  source 1..84: mol_type = other DNA
tttttttaagcagtggtatcaacgcagagtacnntaggaagcnnacagatggnntttttttttttttttttttttttttttttt

SEQ ID NO: 5210 - DNA, 84 bp, synthetic construct
  source 1..84: mol_type = other DNA
tttttttaagcagtggtatcaacgcagagtacnntaggaagcnnaggagtcanntttttttttttttttttttttttttttttt

SEQ ID NO: 5211 - DNA, 84 bp, synthetic construct
  source 1..84: mol_type = other DNA
tttttttaagcagtggtatcaacgcagagtacnntaggaagcnncgtgttacnntttttttttttttttttttttttttttttt

SEQ ID NO: 5212 - DNA, 84 bp, synthetic construct
  source 1..84: mol_type = other DNA
tttttttaagcagtggtatcaacgcagagtacnntaggaagcnntagtgtgcnntttttttttttttttttttttttttttttt

SEQ ID NO: 5213 - DNA, 84 bp, synthetic construct
  source 1..84: mol_type = other DNA
tttttttaagcagtggtatcaacgcagagtacnntaggaagcnnctcatgacnntttttttttttttttttttttttttttttt

SEQ ID NO: 5214 - DNA, 84 bp, synthetic construct
  source 1..84: mol_type = other DNA
tttttttaagcagtggtatcaacgcagagtacnntaggaagcnngtatccagnntttttttttttttttttttttttttttttt

SEQ ID NO: 5215 - DNA, 84 bp, synthetic construct
  source 1..84: mol_type = other DNA
tttttttaagcagtggtatcaacgcagagtacnntaggaagcnnacgcctatnntttttttttttttttttttttttttttttt

SEQ ID NO: 5216 - DNA, 84 bp, synthetic construct
  source 1..84: mol_type = other DNA
tttttttaagcagtggtatcaacgcagagtacnntaggaagcnnaacgacctnntttttttttttttttttttttttttttttt

SEQ ID NO: 5217 - DNA, 84 bp, synthetic construct
  source 1..84: mol_type = other DNA
tttttttaagcagtggtatcaacgcagagtacnntaggaagcnnatcaggctnntttttttttttttttttttttttttttttt

SEQ ID NO: 5218 - DNA, 84 bp, synthetic construct
  source 1..84: mol_type = other DNA
tttttttaagcagtggtatcaacgcagagtacnntaggaagcnncaagttcgnntttttttttttttttttttttttttttttt

SEQ ID NO: 5219 - DNA, 84 bp, synthetic construct
  source 1..84: mol_type = other DNA
tttttttaagcagtggtatcaacgcagagtacnntaggaagcnntagccaganntttttttttttttttttttttttttttttt

SEQ ID NO: 5220 - DNA, 84 bp, synthetic construct
  source 1..84: mol_type = other DNA
tttttttaagcagtggtatcaacgcagagtacnntaggaagcnncaatcacgnntttttttttttttttttttttttttttttt

SEQ ID NO: 5221 - DNA, 84 bp, synthetic construct
  source 1..84: mol_type = other DNA
tttttttaagcagtggtatcaacgcagagtacnntaggaagcnngcaacaagnntttttttttttttttttttttttttttttt

SEQ ID NO: 5222 - DNA, 84 bp, synthetic construct
  source 1..84: mol_type = other DNA
tttttttaagcagtggtatcaacgcagagtacnntaggaagcnncacgacaanntttttttttttttttttttttttttttttt

SEQ ID NO: 5223 - DNA, 84 bp, synthetic construct
  source 1..84: mol_type = other DNA
tttttttaagcagtggtatcaacgcagagtacnntaggaagcnntacggaganntttttttttttttttttttttttttttttt

SEQ ID NO: 5224 - DNA, 84 bp, synthetic construct
  source 1..84: mol_type = other DNA
tttttttaagcagtggtatcaacgcagagtacnntaggaagcnncgacaaganntttttttttttttttttttttttttttttt

SEQ ID NO: 5225 - DNA, 84 bp, synthetic construct
  source 1..84: mol_type = other DNA
tttttttaagcagtggtatcaacgcagagtacnntaggaagcnncgaagtganntttttttttttttttttttttttttttttt

SEQ ID NO: 5226 - DNA, 84 bp, synthetic construct
  source 1..84: mol_type = other DNA
tttttttaagcagtggtatcaacgcagagtacnntaggaagcnnagctggtanntttttttttttttttttttttttttttttt

SEQ ID NO: 5227 - DNA, 84 bp, synthetic construct
  source 1..84: mol_type = other DNA
tttttttaagcagtggtatcaacgcagagtacnntaggaagcnnaactaggcnntttttttttttttttttttttttttttttt

SEQ ID NO: 5228 - DNA, 84 bp, synthetic construct
  source 1..84: mol_type = other DNA
tttttttaagcagtggtatcaacgcagagtacnntaggaagcnncagcaagtnntttttttttttttttttttttttttttttt

SEQ ID NO: 5229 - DNA, 84 bp, synthetic construct
  source 1..84: mol_type = other DNA
tttttttaagcagtggtatcaacgcagagtacnntaggaagcnnacgaggtanntttttttttttttttttttttttttttttt

SEQ ID NO: 5230 - DNA, 84 bp, synthetic construct
  source 1..84: mol_type = other DNA
tttttttaagcagtggtatcaacgcagagtacnntaggaagcnncatcttccnntttttttttttttttttttttttttttttt

SEQ ID NO: 5231 - DNA, 84 bp, synthetic construct
  source 1..84: mol_type = other DNA
tttttttaagcagtggtatcaacgcagagtacnntaggaagcnncctgaatcnntttttttttttttttttttttttttttttt

SEQ ID NO: 5232 - DNA, 84 bp, synthetic construct
  source 1..84: mol_type = other DNA
tttttttaagcagtggtatcaacgcagagtacnntaggaagcnntgcagactnntttttttttttttttttttttttttttttt

SEQ ID NO: 5233 - DNA, 84 bp, synthetic construct
  source 1..84: mol_type = other DNA
tttttttaagcagtggtatcaacgcagagtacnntaggaagcnnagatgtggnntttttttttttttttttttttttttttttt

SEQ ID NO: 5234 - DNA, 84 bp, synthetic construct
  source 1..84: mol_type = other DNA
tttttttaagcagtggtatcaacgcagagtacnntaggaagcnnagttcgacnntttttttttttttttttttttttttttttt

SEQ ID NO: 5235 - DNA, 84 bp, synthetic construct
  source 1..84: mol_type = other DNA
tttttttaagcagtggtatcaacgcagagtacnntaggaagcnnacaacctcnntttttttttttttttttttttttttttttt

SEQ ID NO: 5236 - DNA, 84 bp, synthetic construct
  source 1..84: mol_type = other DNA
tttttttaagcagtggtatcaacgcagagtacnntaggaagcnncatggtagnntttttttttttttttttttttttttttttt

SEQ ID NO: 5237 - DNA, 84 bp, synthetic construct
  source 1..84: mol_type = other DNA
tttttttaagcagtggtatcaacgcagagtacnntaggaagcnncgtatctcnntttttttttttttttttttttttttttttt

SEQ ID NO: 5238 - DNA, 84 bp, synthetic construct
  source 1..84: mol_type = other DNA
tttttttaagcagtggtatcaacgcagagtacnntaggaagcnncctagttcnntttttttttttttttttttttttttttttt

SEQ ID NO: 5239 - DNA, 84 bp, synthetic construct
  source 1..84: mol_type = other DNA
tttttttaagcagtggtatcaacgcagagtacnntaggaagcnncaagagtcnntttttttttttttttttttttttttttttt

SEQ ID NO: 5240 - DNA, 84 bp, synthetic construct
  source 1..84: mol_type = other DNA
tttttttaagcagtggtatcaacgcagagtacnnttcaggagnnaatcggcanntttttttttttttttttttttttttttttt

SEQ ID NO: 5241 - DNA, 84 bp, synthetic construct
  source 1..84: mol_type = other DNA
tttttttaagcagtggtatcaacgcagagtacnnttcaggagnntacggcatnntttttttttttttttttttttttttttttt

SEQ ID NO: 5242 - DNA, 84 bp, synthetic construct
  source 1..84: mol_type = other DNA
tttttttaagcagtggtatcaacgcagagtacnnttcaggagnnttggatcgnntttttttttttttttttttttttttttttt

SEQ ID NO: 5243 - DNA, 84 bp, synthetic construct
  source 1..84: mol_type = other DNA
tttttttaagcagtggtatcaacgcagagtacnnttcaggagnntggaacganntttttttttttttttttttttttttttttt

SEQ ID NO: 5244 - DNA, 84 bp, synthetic construct
  source 1..84: mol_type = other DNA
tttttttaagcagtggtatcaacgcagagtacnnttcaggagnnggcaatcanntttttttttttttttttttttttttttttt

SEQ ID NO: 5245 - DNA, 84 bp, synthetic construct
  source 1..84: mol_type = other DNA
tttttttaagcagtggtatcaacgcagagtacnnttcaggagnngaatccganntttttttttttttttttttttttttttttt

SEQ ID NO: 5246 - DNA, 84 bp, synthetic construct
  source 1..84: mol_type = other DNA
tttttttaagcagtggtatcaacgcagagtacnnttcaggagnnttacggtgnntttttttttttttttttttttttttttttt

SEQ ID NO: 5247 - DNA, 84 bp, synthetic construct
  source 1..84: mol_type = other DNA
tttttttaagcagtggtatcaacgcagagtacnnttcaggagnncatatcggnntttttttttttttttttttttttttttttt

SEQ ID NO: 5248 - DNA, 84 bp, synthetic construct
  source 1..84: mol_type = other DNA
tttttttaagcagtggtatcaacgcagagtacnnttcaggagnncttcggtanntttttttttttttttttttttttttttttt

SEQ ID NO: 5249 - DNA, 84 bp, synthetic construct
  source 1..84: mol_type = other DNA
tttttttaagcagtggtatcaacgcagagtacnnttcaggagnntcctaacgnntttttttttttttttttttttttttttttt

SEQ ID NO: 5250 - DNA, 84 bp, synthetic construct
  source 1..84: mol_type = other DNA
tttttttaagcagtggtatcaacgcagagtacnnttcaggagnngtaagccanntttttttttttttttttttttttttttttt

SEQ ID NO: 5251 - DNA, 84 bp, synthetic construct
  source 1..84: mol_type = other DNA
tttttttaagcagtggtatcaacgcagagtacnnttcaggagnntaaggtggnntttttttttttttttttttttttttttttt

SEQ ID NO: 5252 - DNA, 84 bp, synthetic construct
  source 1..84: mol_type = other DNA
tttttttaagcagtggtatcaacgcagagtacnnttcaggagnnggtaagctnntttttttttttttttttttttttttttttt

SEQ ID NO: 5253 - DNA, 84 bp, synthetic construct
  source 1..84: mol_type = other DNA
tttttttaagcagtggtatcaacgcagagtacnnttcaggagnntgtgtcganntttttttttttttttttttttttttttttt

SEQ ID NO: 5254 - DNA, 84 bp, synthetic construct
  source 1..84: mol_type = other DNA
tttttttaagcagtggtatcaacgcagagtacnnttcaggagnngagcatganntttttttttttttttttttttttttttttt

SEQ ID NO: 5255 - DNA, 84 bp, synthetic construct
  source 1..84: mol_type = other DNA
tttttttaagcagtggtatcaacgcagagtacnnttcaggagnntcgaagtcnntttttttttttttttttttttttttttttt

SEQ ID NO: 5256 - DNA, 84 bp, synthetic construct
  source 1..84: mol_type = other DNA
tttttttaagcagtggtatcaacgcagagtacnnttcaggagnnggtgaacanntttttttttttttttttttttttttttttt

SEQ ID NO: 5257 - DNA, 84 bp, synthetic construct
  source 1..84: mol_type = other DNA
tttttttaagcagtggtatcaacgcagagtacnnttcaggagnnacatgcacnntttttttttttttttttttttttttttttt

SEQ ID NO: 5258 - DNA, 84 bp, synthetic construct
  source 1..84: mol_type = other DNA
tttttttaagcagtggtatcaacgcagagtacnnttcaggagnnccaacagtnntttttttttttttttttttttttttttttt

SEQ ID NO: 5259 - DNA, 84 bp, synthetic construct
  source 1..84: mol_type = other DNA
tttttttaagcagtggtatcaacgcagagtacnnttcaggagnnagaacagcnntttttttttttttttttttttttttttttt

SEQ ID NO: 5260 - DNA, 84 bp, synthetic construct
  source 1..84: mol_type = other DNA
tttttttaagcagtggtatcaacgcagagtacnnttcaggagnngaacacgtnntttttttttttttttttttttttttttttt

SEQ ID NO: 5261 - DNA, 84 bp, synthetic construct
  source 1..84: mol_type = other DNA
tttttttaagcagtggtatcaacgcagagtacnnttcaggagnnggtcttcanntttttttttttttttttttttttttttttt

SEQ ID NO: 5262 - DNA, 84 bp, synthetic construct
  source 1..84: mol_type = other DNA
tttttttaagcagtggtatcaacgcagagtacnnttcaggagnnaggttcagnntttttttttttttttttttttttttttttt

SEQ ID NO: 5263 - DNA, 84 bp, synthetic construct
  source 1..84: mol_type = other DNA
tttttttaagcagtggtatcaacgcagagtacnnttcaggagnnctagagcanntttttttttttttttttttttttttttttt

SEQ ID NO: 5264 - DNA, 84 bp, synthetic construct
  source 1..84: mol_type = other DNA
tttttttaagcagtggtatcaacgcagagtacnnttcaggagnncttctagcnntttttttttttttttttttttttttttttt

SEQ ID NO: 5265 - DNA, 84 bp, synthetic construct
  source 1..84: mol_type = other DNA
tttttttaagcagtggtatcaacgcagagtacnnttcaggagnngagtaacgnntttttttttttttttttttttttttttttt

SEQ ID NO: 5266 - DNA, 84 bp, synthetic construct
  source 1..84: mol_type = other DNA
tttttttaagcagtggtatcaacgcagagtacnnttcaggagnnctaagaggnntttttttttttttttttttttttttttttt

SEQ ID NO: 5267 - DNA, 84 bp, synthetic construct
  source 1..84: mol_type = other DNA
tttttttaagcagtggtatcaacgcagagtacnnttcaggagnnacgtgtagnntttttttttttttttttttttttttttttt

SEQ ID NO: 5268 - DNA, 84 bp, synthetic construct
  source 1..84: mol_type = other DNA
tttttttaagcagtggtatcaacgcagagtacnnttcaggagnnactacaggnntttttttttttttttttttttttttttttt

SEQ ID NO: 5269 - DNA, 84 bp, synthetic construct
  source 1..84: mol_type = other DNA
tttttttaagcagtggtatcaacgcagagtacnnttcaggagnntacaggtcnntttttttttttttttttttttttttttttt

SEQ ID NO: 5270 - DNA, 84 bp, synthetic construct
  source 1..84: mol_type = other DNA
tttttttaagcagtggtatcaacgcagagtacnnttcaggagnnctcacatgnntttttttttttttttttttttttttttttt

SEQ ID NO: 5271 - DNA, 84 bp, synthetic construct
  source 1..84: mol_type = other DNA
tttttttaagcagtggtatcaacgcagagtacnnttcaggagnnactaggagnntttttttttttttttttttttttttttttt

SEQ ID NO: 5272 - DNA, 84 bp, synthetic construct
  source 1..84: mol_type = other DNA
tttttttaagcagtggtatcaacgcagagtacnnttcaggagnnccatagganntttttttttttttttttttttttttttttt

SEQ ID NO: 5273 - DNA, 84 bp, synthetic construct
  source 1..84: mol_type = other DNA
tttttttaagcagtggtatcaacgcagagtacnnttcaggagnnggagaatcnntttttttttttttttttttttttttttttt

SEQ ID NO: 5274 - DNA, 84 bp, synthetic construct
  source 1..84: mol_type = other DNA
tttttttaagcagtggtatcaacgcagagtacnnttcaggagnngccaagaanntttttttttttttttttttttttttttttt

SEQ ID NO: 5275 - DNA, 84 bp, synthetic construct
  source 1..84: mol_type = other DNA
tttttttaagcagtggtatcaacgcagagtacnnttcaggagnnaaggcaagnntttttttttttttttttttttttttttttt

SEQ ID NO: 5276 - DNA, 84 bp, synthetic construct
  source 1..84: mol_type = other DNA
tttttttaagcagtggtatcaacgcagagtacnnttcaggagnnaatgtcgcnntttttttttttttttttttttttttttttt

SEQ ID NO: 5277 - DNA, 84 bp, synthetic construct
  source 1..84: mol_type = other DNA
tttttttaagcagtggtatcaacgcagagtacnnttcaggagnnatggaaccnntttttttttttttttttttttttttttttt

SEQ ID NO: 5278 - DNA, 84 bp, synthetic construct
  source 1..84: mol_type = other DNA
tttttttaagcagtggtatcaacgcagagtacnnttcaggagnnagaggcatnntttttttttttttttttttttttttttttt

SEQ ID NO: 5279 - DNA, 84 bp, synthetic construct
  source 1..84: mol_type = other DNA
tttttttaagcagtggtatcaacgcagagtacnnttcaggagnntgcatagcnntttttttttttttttttttttttttttttt

SEQ ID NO: 5280 - DNA, 84 bp, synthetic construct
  source 1..84: mol_type = other DNA
tttttttaagcagtggtatcaacgcagagtacnnttcaggagnnctaacgganntttttttttttttttttttttttttttttt

SEQ ID NO: 5281 - DNA, 84 bp, synthetic construct
  source 1..84: mol_type = other DNA
tttttttaagcagtggtatcaacgcagagtacnnttcaggagnntatcgaggnntttttttttttttttttttttttttttttt

SEQ ID NO: 5282 - DNA, 84 bp, synthetic construct
  source 1..84: mol_type = other DNA
tttttttaagcagtggtatcaacgcagagtacnnttcaggagnncatagcctnntttttttttttttttttttttttttttttt

SEQ ID NO: 5283 - DNA, 84 bp, synthetic construct
  source 1..84: mol_type = other DNA
tttttttaagcagtggtatcaacgcagagtacnnttcaggagnnatcgagacnntttttttttttttttttttttttttttttt

SEQ ID NO: 5284 - DNA, 84 bp, synthetic construct
  source 1..84: mol_type = other DNA
tttttttaagcagtggtatcaacgcagagtacnnttcaggagnnggaagagtnntttttttttttttttttttttttttttttt

SEQ ID NO: 5285 - DNA, 84 bp, synthetic construct
  source 1..84: mol_type = other DNA
tttttttaagcagtggtatcaacgcagagtacnnttcaggagnnccaagtagnntttttttttttttttttttttttttttttt

SEQ ID NO: 5286 - DNA, 84 bp, synthetic construct
  source 1..84: mol_type = other DNA
tttttttaagcagtggtatcaacgcagagtacnnttcaggagnnctgaacagnntttttttttttttttttttttttttttttt

SEQ ID NO: 5287 - DNA, 84 bp, synthetic construct
  source 1..84: mol_type = other DNA
tttttttaagcagtggtatcaacgcagagtacnnttcaggagnngtaggttcnntttttttttttttttttttttttttttttt

SEQ ID NO: 5288 - DNA, 84 bp, synthetic construct
  source 1..84: mol_type = other DNA
tttttttaagcagtggtatcaacgcagagtacnnttcaggagnngtatggacnntttttttttttttttttttttttttttttt

SEQ ID NO: 5289 - DNA, 84 bp, synthetic construct
  source 1..84: mol_type = other DNA
tttttttaagcagtggtatcaacgcagagtacnnttcaggagnntcgcaacanntttttttttttttttttttttttttttttt

SEQ ID NO: 5290 - DNA, 84 bp, synthetic construct
  source 1..84: mol_type = other DNA
tttttttaagcagtggtatcaacgcagagtacnnttcaggagnnccgctaatnntttttttttttttttttttttttttttttt

SEQ ID NO: 5291 - DNA, 84 bp, synthetic construct
  source 1..84: mol_type = other DNA
tttttttaagcagtggtatcaacgcagagtacnnttcaggagnngattcgcanntttttttttttttttttttttttttttttt

SEQ ID NO: 5292 - DNA, 84 bp, synthetic construct
  source 1..84: mol_type = other DNA
tttttttaagcagtggtatcaacgcagagtacnnttcaggagnncgatggaanntttttttttttttttttttttttttttttt

SEQ ID NO: 5293 - DNA, 84 bp, synthetic construct
  source 1..84: mol_type = other DNA
tttttttaagcagtggtatcaacgcagagtacnnttcaggagnnagcaagganntttttttttttttttttttttttttttttt

SEQ ID NO: 5294 - DNA, 84 bp, synthetic construct
  source 1..84: mol_type = other DNA
tttttttaagcagtggtatcaacgcagagtacnnttcaggagnncgtagcaanntttttttttttttttttttttttttttttt

SEQ ID NO: 5295 - DNA, 84 bp, synthetic construct
  source 1..84: mol_type = other DNA
tttttttaagcagtggtatcaacgcagagtacnnttcaggagnntggcagtanntttttttttttttttttttttttttttttt

SEQ ID NO: 5296 - DNA, 84 bp, synthetic construct
  source 1..84: mol_type = other DNA
tttttttaagcagtggtatcaacgcagagtacnnttcaggagnncggtagttnntttttttttttttttttttttttttttttt

SEQ ID NO: 5297 - DNA, 84 bp, synthetic construct
  source 1..84: mol_type = other DNA
tttttttaagcagtggtatcaacgcagagtacnnttcaggagnntgacttcgnntttttttttttttttttttttttttttttt

SEQ ID NO: 5298 - DNA, 84 bp, synthetic construct
  source 1..84: mol_type = other DNA
tttttttaagcagtggtatcaacgcagagtacnnttcaggagnngagtgcaanntttttttttttttttttttttttttttttt

SEQ ID NO: 5299 - DNA, 84 bp, synthetic construct
  source 1..84: mol_type = other DNA
tttttttaagcagtggtatcaacgcagagtacnnttcaggagnnacggtaacnntttttttttttttttttttttttttttttt

SEQ ID NO: 5300 - DNA, 84 bp, synthetic construct
  source 1..84: mol_type = other DNA
tttttttaagcagtggtatcaacgcagagtacnnttcaggagnnaagtggtgnntttttttttttttttttttttttttttttt

SEQ ID NO: 5301 - DNA, 84 bp, synthetic construct
  source 1..84: mol_type = other DNA
tttttttaagcagtggtatcaacgcagagtacnnttcaggagnnggagacaanntttttttttttttttttttttttttttttt

SEQ ID NO: 5302 - DNA, 84 bp, synthetic construct
  source 1..84: mol_type = other DNA
tttttttaagcagtggtatcaacgcagagtacnnttcaggagnntcaaggacnntttttttttttttttttttttttttttttt

SEQ ID NO: 5303 - DNA, 84 bp, synthetic construct
  source 1..84: mol_type = other DNA
tttttttaagcagtggtatcaacgcagagtacnnttcaggagnnaagagagcnntttttttttttttttttttttttttttttt

SEQ ID NO: 5304 - DNA, 84 bp, synthetic construct
  source 1..84: mol_type = other DNA
tttttttaagcagtggtatcaacgcagagtacnnttcaggagnncgagagatnntttttttttttttttttttttttttttttt

SEQ ID NO: 5305 - DNA, 84 bp, synthetic construct
  source 1..84: mol_type = other DNA
tttttttaagcagtggtatcaacgcagagtacnnttcaggagnnacagatggnntttttttttttttttttttttttttttttt

SEQ ID NO: 5306 - DNA, 84 bp, synthetic construct
  source 1..84: mol_type = other DNA
tttttttaagcagtggtatcaacgcagagtacnnttcaggagnnaggagtcanntttttttttttttttttttttttttttttt

SEQ ID NO: 5307 - DNA, 84 bp, synthetic construct
  source 1..84: mol_type = other DNA
tttttttaagcagtggtatcaacgcagagtacnnttcaggagnncgtgttacnntttttttttttttttttttttttttttttt

SEQ ID NO: 5308 - DNA, 84 bp, synthetic construct
  source 1..84: mol_type = other DNA
tttttttaagcagtggtatcaacgcagagtacnnttcaggagnntagtgtgcnntttttttttttttttttttttttttttttt

SEQ ID NO: 5309 - DNA, 84 bp, synthetic construct
  source 1..84: mol_type = other DNA
tttttttaagcagtggtatcaacgcagagtacnnttcaggagnnctcatgacnntttttttttttttttttttttttttttttt

SEQ ID NO: 5310 - DNA, 84 bp, synthetic construct
  source 1..84: mol_type = other DNA
tttttttaagcagtggtatcaacgcagagtacnnttcaggagnngtatccagnntttttttttttttttttttttttttttttt

SEQ ID NO: 5311 - DNA, 84 bp, synthetic construct
  source 1..84: mol_type = other DNA
tttttttaagcagtggtatcaacgcagagtacnnttcaggagnnacgcctatnntttttttttttttttttttttttttttttt

SEQ ID NO: 5312 - DNA, 84 bp, synthetic construct
  source 1..84: mol_type = other DNA
tttttttaagcagtggtatcaacgcagagtacnnttcaggagnnaacgacctnntttttttttttttttttttttttttttttt

SEQ ID NO: 5313 - DNA, 84 bp, synthetic construct
  source 1..84: mol_type = other DNA
tttttttaagcagtggtatcaacgcagagtacnnttcaggagnnatcaggctnntttttttttttttttttttttttttttttt

SEQ ID NO: 5314 - DNA, 84 bp, synthetic construct
  source 1..84: mol_type = other DNA
tttttttaagcagtggtatcaacgcagagtacnnttcaggagnncaagttcgnntttttttttttttttttttttttttttttt

SEQ ID NO: 5315 - DNA, 84 bp, synthetic construct
  source 1..84: mol_type = other DNA
tttttttaagcagtggtatcaacgcagagtacnnttcaggagnntagccaganntttttttttttttttttttttttttttttt

SEQ ID NO: 5316 - DNA, 84 bp, synthetic construct
  source 1..84: mol_type = other DNA
tttttttaagcagtggtatcaacgcagagtacnnttcaggagnncaatcacgnntttttttttttttttttttttttttttttt

SEQ ID NO: 5317 - DNA, 84 bp, synthetic construct
  source 1..84: mol_type = other DNA
tttttttaagcagtggtatcaacgcagagtacnnttcaggagnngcaacaagnntttttttttttttttttttttttttttttt

SEQ ID NO: 5318 - DNA, 84 bp, synthetic construct
  source 1..84: mol_type = other DNA
tttttttaagcagtggtatcaacgcagagtacnnttcaggagnncacgacaanntttttttttttttttttttttttttttttt

SEQ ID NO: 5319 - DNA, 84 bp, synthetic construct
  source 1..84: mol_type = other DNA
tttttttaagcagtggtatcaacgcagagtacnnttcaggagnntacggaganntttttttttttttttttttttttttttttt

SEQ ID NO: 5320 - DNA, 84 bp, synthetic construct
  source 1..84: mol_type = other DNA
tttttttaagcagtggtatcaacgcagagtacnnttcaggagnncgacaaganntttttttttttttttttttttttttttttt

SEQ ID NO: 5321 - DNA, 84 bp, synthetic construct
  source 1..84: mol_type = other DNA
tttttttaagcagtggtatcaacgcagagtacnnttcaggagnncgaagtganntttttttttttttttttttttttttttttt

SEQ ID NO: 5322 - DNA, 84 bp, synthetic construct
  source 1..84: mol_type = other DNA
tttttttaagcagtggtatcaacgcagagtacnnttcaggagnnagctggtanntttttttttttttttttttttttttttttt

SEQ ID NO: 5323 - DNA, 84 bp, synthetic construct
  source 1..84: mol_type = other DNA
tttttttaagcagtggtatcaacgcagagtacnnttcaggagnnaactaggcnntttttttttttttttttttttttttttttt

SEQ ID NO: 5324 - DNA, 84 bp, synthetic construct
  source 1..84: mol_type = other DNA
tttttttaagcagtggtatcaacgcagagtacnnttcaggagnncagcaagtnntttttttttttttttttttttttttttttt

SEQ ID NO: 5325 - DNA, 84 bp, synthetic construct
  source 1..84: mol_type = other DNA
tttttttaagcagtggtatcaacgcagagtacnnttcaggagnnacgaggtanntttttttttttttttttttttttttttttt

SEQ ID NO: 5326 - DNA, 84 bp, synthetic construct
  source 1..84: mol_type = other DNA
tttttttaagcagtggtatcaacgcagagtacnnttcaggagnncatcttccnntttttttttttttttttttttttttttttt

SEQ ID NO: 5327 - DNA, 84 bp, synthetic construct
  source 1..84: mol_type = other DNA
tttttttaagcagtggtatcaacgcagagtacnnttcaggagnncctgaatcnntttttttttttttttttttttttttttttt

SEQ ID NO: 5328 - DNA, 84 bp, synthetic construct
  source 1..84: mol_type = other DNA
tttttttaagcagtggtatcaacgcagagtacnnttcaggagnntgcagactnntttttttttttttttttttttttttttttt

SEQ ID NO: 5329 - DNA, 84 bp, synthetic construct
  source 1..84: mol_type = other DNA
tttttttaagcagtggtatcaacgcagagtacnnttcaggagnnagatgtggnntttttttttttttttttttttttttttttt

SEQ ID NO: 5330 - DNA, 84 bp, synthetic construct
  source 1..84: mol_type = other DNA
tttttttaagcagtggtatcaacgcagagtacnnttcaggagnnagttcgacnntttttttttttttttttttttttttttttt

SEQ ID NO: 5331 - DNA, 84 bp, synthetic construct
  source 1..84: mol_type = other DNA
tttttttaagcagtggtatcaacgcagagtacnnttcaggagnnacaacctcnntttttttttttttttttttttttttttttt

SEQ ID NO: 5332 - DNA, 84 bp, synthetic construct
  source 1..84: mol_type = other DNA
tttttttaagcagtggtatcaacgcagagtacnnttcaggagnncatggtagnntttttttttttttttttttttttttttttt

SEQ ID NO: 5333 - DNA, 84 bp, synthetic construct
  source 1..84: mol_type = other DNA
tttttttaagcagtggtatcaacgcagagtacnnttcaggagnncgtatctcnntttttttttttttttttttttttttttttt

SEQ ID NO: 5334 - DNA, 84 bp, synthetic construct
  source 1..84: mol_type = other DNA
tttttttaagcagtggtatcaacgcagagtacnnttcaggagnncctagttcnntttttttttttttttttttttttttttttt

SEQ ID NO: 5335 - DNA, 84 bp, synthetic construct
  source 1..84: mol_type = other DNA
tttttttaagcagtggtatcaacgcagagtacnnttcaggagnncaagagtcnntttttttttttttttttttttttttttttt

SEQ ID NO: 5336 - DNA, 84 bp, synthetic construct
  source 1..84: mol_type = other DNA
tttttttaagcagtggtatcaacgcagagtacnngtcataggnnaatcggcanntttttttttttttttttttttttttttttt

SEQ ID NO: 5337 - DNA, 84 bp, synthetic construct
  source 1..84: mol_type = other DNA
tttttttaagcagtggtatcaacgcagagtacnngtcataggnntacggcatnntttttttttttttttttttttttttttttt

SEQ ID NO: 5338 - DNA, 84 bp, synthetic construct
  source 1..84: mol_type = other DNA
tttttttaagcagtggtatcaacgcagagtacnngtcataggnnttggatcgnntttttttttttttttttttttttttttttt

SEQ ID NO: 5339 - DNA, 84 bp, synthetic construct
  source 1..84: mol_type = other DNA
tttttttaagcagtggtatcaacgcagagtacnngtcataggnntggaacganntttttttttttttttttttttttttttttt

SEQ ID NO: 5340 - DNA, 84 bp, synthetic construct
  source 1..84: mol_type = other DNA
tttttttaagcagtggtatcaacgcagagtacnngtcataggnnggcaatcanntttttttttttttttttttttttttttttt

SEQ ID NO: 5341 - DNA, 84 bp, synthetic construct
  source 1..84: mol_type = other DNA
tttttttaagcagtggtatcaacgcagagtacnngtcataggnngaatccganntttttttttttttttttttttttttttttt

SEQ ID NO: 5342 - DNA, 84 bp, synthetic construct
  source 1..84: mol_type = other DNA
tttttttaagcagtggtatcaacgcagagtacnngtcataggnnttacggtgnntttttttttttttttttttttttttttttt

SEQ ID NO: 5343 - DNA, 84 bp, synthetic construct
  source 1..84: mol_type = other DNA
tttttttaagcagtggtatcaacgcagagtacnngtcataggnncatatcggnntttttttttttttttttttttttttttttt

SEQ ID NO: 5344 - DNA, 84 bp, synthetic construct
  source 1..84: mol_type = other DNA
tttttttaagcagtggtatcaacgcagagtacnngtcataggnncttcggtanntttttttttttttttttttttttttttttt

SEQ ID NO: 5345 - DNA, 84 bp, synthetic construct
  source 1..84: mol_type = other DNA
tttttttaagcagtggtatcaacgcagagtacnngtcataggnntcctaacgnntttttttttttttttttttttttttttttt

SEQ ID NO: 5346 - DNA, 84 bp, synthetic construct
  source 1..84: mol_type = other DNA
tttttttaagcagtggtatcaacgcagagtacnngtcataggnngtaagccanntttttttttttttttttttttttttttttt

SEQ ID NO: 5347 - DNA, 84 bp, synthetic construct
  source 1..84: mol_type = other DNA
tttttttaagcagtggtatcaacgcagagtacnngtcataggnntaaggtggnntttttttttttttttttttttttttttttt

SEQ ID NO: 5348 - DNA, 84 bp, synthetic construct
  source 1..84: mol_type = other DNA
tttttttaagcagtggtatcaacgcagagtacnngtcataggnnggtaagctnntttttttttttttttttttttttttttttt

SEQ ID NO: 5349 - DNA, 84 bp, synthetic construct
  source 1..84: mol_type = other DNA
tttttttaagcagtggtatcaacgcagagtacnngtcataggnntgtgtcganntttttttttttttttttttttttttttttt

SEQ ID NO: 5350 - DNA, 84 bp, synthetic construct
  source 1..84: mol_type = other DNA
tttttttaagcagtggtatcaacgcagagtacnngtcataggnngagcatganntttttttttttttttttttttttttttttt

SEQ ID NO: 5351 - DNA, 84 bp, synthetic construct
  source 1..84: mol_type = other DNA
tttttttaagcagtggtatcaacgcagagtacnngtcataggnntcgaagtcnntttttttttttttttttttttttttttttt

SEQ ID NO: 5352 - DNA, 84 bp, synthetic construct
  source 1..84: mol_type = other DNA
tttttttaagcagtggtatcaacgcagagtacnngtcataggnnggtgaacanntttttttttttttttttttttttttttttt

SEQ ID NO: 5353 - DNA, 84 bp, synthetic construct
  source 1..84: mol_type = other DNA
tttttttaagcagtggtatcaacgcagagtacnngtcataggnnacatgcacnntttttttttttttttttttttttttttttt

SEQ ID NO: 5354 - DNA, 84 bp, synthetic construct
  source 1..84: mol_type = other DNA
tttttttaagcagtggtatcaacgcagagtacnngtcataggnnccaacagtnntttttttttttttttttttttttttttttt

SEQ ID NO: 5355 - DNA, 84 bp, synthetic construct
  source 1..84: mol_type = other DNA
tttttttaagcagtggtatcaacgcagagtacnngtcataggnnagaacagcnntttttttttttttttttttttttttttttt

SEQ ID NO: 5356 - DNA, 84 bp, synthetic construct
  source 1..84: mol_type = other DNA
tttttttaagcagtggtatcaacgcagagtacnngtcataggnngaacacgtnntttttttttttttttttttttttttttttt

SEQ ID NO: 5357 - DNA, 84 bp, synthetic construct
  source 1..84: mol_type = other DNA
tttttttaagcagtggtatcaacgcagagtacnngtcataggnnggtcttcanntttttttttttttttttttttttttttttt

SEQ ID NO: 5358 - DNA, 84 bp, synthetic construct
  source 1..84: mol_type = other DNA
tttttttaagcagtggtatcaacgcagagtacnngtcataggnnaggttcagnntttttttttttttttttttttttttttttt

SEQ ID NO: 5359 - DNA, 84 bp, synthetic construct
  source 1..84: mol_type = other DNA
tttttttaagcagtggtatcaacgcagagtacnngtcataggnnctagagcanntttttttttttttttttttttttttttttt

SEQ ID NO: 5360 - DNA, 84 bp, synthetic construct
  source 1..84: mol_type = other DNA
tttttttaagcagtggtatcaacgcagagtacnngtcataggnncttctagcnntttttttttttttttttttttttttttttt

SEQ ID NO: 5361 - DNA, 84 bp, synthetic construct
  source 1..84: mol_type = other DNA
tttttttaagcagtggtatcaacgcagagtacnngtcataggnngagtaacgnntttttttttttttttttttttttttttttt

SEQ ID NO: 5362 - DNA, 84 bp, synthetic construct
  source 1..84: mol_type = other DNA
tttttttaagcagtggtatcaacgcagagtacnngtcataggnnctaagaggnntttttttttttttttttttttttttttttt

SEQ ID NO: 5363 - DNA, 84 bp, synthetic construct
  source 1..84: mol_type = other DNA
tttttttaagcagtggtatcaacgcagagtacnngtcataggnnacgtgtagnntttttttttttttttttttttttttttttt

SEQ ID NO: 5364 - DNA, 84 bp, synthetic construct
  source 1..84: mol_type = other DNA
tttttttaagcagtggtatcaacgcagagtacnngtcataggnnactacaggnntttttttttttttttttttttttttttttt

SEQ ID NO: 5365 - DNA, 84 bp, synthetic construct
  source 1..84: mol_type = other DNA
tttttttaagcagtggtatcaacgcagagtacnngtcataggnntacaggtcnntttttttttttttttttttttttttttttt

SEQ ID NO: 5366 - DNA, 84 bp, synthetic construct
  source 1..84: mol_type = other DNA
tttttttaagcagtggtatcaacgcagagtacnngtcataggnnctcacatgnntttttttttttttttttttttttttttttt

SEQ ID NO: 5367 - DNA, 84 bp, synthetic construct
  source 1..84: mol_type = other DNA
tttttttaagcagtggtatcaacgcagagtacnngtcataggnnactaggagnntttttttttttttttttttttttttttttt

SEQ ID NO: 5368 - DNA, 84 bp, synthetic construct
  source 1..84: mol_type = other DNA
tttttttaagcagtggtatcaacgcagagtacnngtcataggnnccatagganntttttttttttttttttttttttttttttt

SEQ ID NO: 5369 - DNA, 84 bp, synthetic construct
  source 1..84: mol_type = other DNA
tttttttaagcagtggtatcaacgcagagtacnngtcataggnnggagaatcnntttttttttttttttttttttttttttttt

SEQ ID NO: 5370 - DNA, 84 bp, synthetic construct
  source 1..84: mol_type = other DNA
tttttttaagcagtggtatcaacgcagagtacnngtcataggnngccaagaanntttttttttttttttttttttttttttttt

SEQ ID NO: 5371 - DNA, 84 bp, synthetic construct
  source 1..84: mol_type = other DNA
tttttttaagcagtggtatcaacgcagagtacnngtcataggnnaaggcaagnntttttttttttttttttttttttttttttt

SEQ ID NO: 5372 - DNA, 84 bp, synthetic construct
  source 1..84: mol_type = other DNA
tttttttaagcagtggtatcaacgcagagtacnngtcataggnnaatgtcgcnntttttttttttttttttttttttttttttt

SEQ ID NO: 5373 - DNA, 84 bp, synthetic construct
  source 1..84: mol_type = other DNA
tttttttaagcagtggtatcaacgcagagtacnngtcataggnnatggaaccnntttttttttttttttttttttttttttttt

SEQ ID NO: 5374 - DNA, 84 bp, synthetic construct
  source 1..84: mol_type = other DNA
tttttttaagcagtggtatcaacgcagagtacnngtcataggnnagaggcatnntttttttttttttttttttttttttttttt

SEQ ID NO: 5375 - DNA, 84 bp, synthetic construct
  source 1..84: mol_type = other DNA
tttttttaagcagtggtatcaacgcagagtacnngtcataggnntgcatagcnntttttttttttttttttttttttttttttt

SEQ ID NO: 5376 - DNA, 84 bp, synthetic construct
  source 1..84: mol_type = other DNA
tttttttaagcagtggtatcaacgcagagtacnngtcataggnnctaacgganntttttttttttttttttttttttttttttt

SEQ ID NO: 5377 - DNA, 84 bp, synthetic construct
  source 1..84: mol_type = other DNA
tttttttaagcagtggtatcaacgcagagtacnngtcataggnntatcgaggnntttttttttttttttttttttttttttttt

SEQ ID NO: 5378 - DNA, 84 bp, synthetic construct
  source 1..84: mol_type = other DNA
tttttttaagcagtggtatcaacgcagagtacnngtcataggnncatagcctnntttttttttttttttttttttttttttttt

SEQ ID NO: 5379 - DNA, 84 bp, synthetic construct
  source 1..84: mol_type = other DNA
tttttttaagcagtggtatcaacgcagagtacnngtcataggnnatcgagacnntttttttttttttttttttttttttttttt

SEQ ID NO: 5380 - DNA, 84 bp, synthetic construct
  source 1..84: mol_type = other DNA
tttttttaagcagtggtatcaacgcagagtacnngtcataggnnggaagagtnntttttttttttttttttttttttttttttt

SEQ ID NO: 5381 - DNA, 84 bp, synthetic construct
  source 1..84: mol_type = other DNA
tttttttaagcagtggtatcaacgcagagtacnngtcataggnnccaagtagnntttttttttttttttttttttttttttttt

SEQ ID NO: 5382 - DNA, 84 bp, synthetic construct
  source 1..84: mol_type = other DNA
tttttttaagcagtggtatcaacgcagagtacnngtcataggnnctgaacagnntttttttttttttttttttttttttttttt

SEQ ID NO: 5383 - DNA, 84 bp, synthetic construct
  source 1..84: mol_type = other DNA
tttttttaagcagtggtatcaacgcagagtacnngtcataggnngtaggttcnntttttttttttttttttttttttttttttt

SEQ ID NO: 5384 - DNA, 84 bp, synthetic construct
  source 1..84: mol_type = other DNA
tttttttaagcagtggtatcaacgcagagtacnngtcataggnngtatggacnntttttttttttttttttttttttttttttt

SEQ ID NO: 5385 - DNA, 84 bp, synthetic construct
  source 1..84: mol_type = other DNA
tttttttaagcagtggtatcaacgcagagtacnngtcataggnntcgcaacanntttttttttttttttttttttttttttttt

SEQ ID NO: 5386 - DNA, 84 bp, synthetic construct
  source 1..84: mol_type = other DNA
tttttttaagcagtggtatcaacgcagagtacnngtcataggnnccgctaatnntttttttttttttttttttttttttttttt

SEQ ID NO: 5387 - DNA, 84 bp, synthetic construct
  source 1..84: mol_type = other DNA
tttttttaagcagtggtatcaacgcagagtacnngtcataggnngattcgcanntttttttttttttttttttttttttttttt

SEQ ID NO: 5388 - DNA, 84 bp, synthetic construct
  source 1..84: mol_type = other DNA
tttttttaagcagtggtatcaacgcagagtacnngtcataggnncgatggaanntttttttttttttttttttttttttttttt

SEQ ID NO: 5389 - DNA, 84 bp, synthetic construct
  source 1..84: mol_type = other DNA
tttttttaagcagtggtatcaacgcagagtacnngtcataggnnagcaagganntttttttttttttttttttttttttttttt

SEQ ID NO: 5390 - DNA, 84 bp, synthetic construct
  source 1..84: mol_type = other DNA
tttttttaagcagtggtatcaacgcagagtacnngtcataggnncgtagcaanntttttttttttttttttttttttttttttt

SEQ ID NO: 5391 - DNA, 84 bp, synthetic construct
  source 1..84: mol_type = other DNA
tttttttaagcagtggtatcaacgcagagtacnngtcataggnntggcagtanntttttttttttttttttttttttttttttt

SEQ ID NO: 5392 - DNA, 84 bp, synthetic construct
  source 1..84: mol_type = other DNA
tttttttaagcagtggtatcaacgcagagtacnngtcataggnncggtagttnntttttttttttttttttttttttttttttt

SEQ ID NO: 5393 - DNA, 84 bp, synthetic construct
  source 1..84: mol_type = other DNA
tttttttaagcagtggtatcaacgcagagtacnngtcataggnntgacttcgnntttttttttttttttttttttttttttttt

SEQ ID NO: 5394 - DNA, 84 bp, synthetic construct
  source 1..84: mol_type = other DNA
tttttttaagcagtggtatcaacgcagagtacnngtcataggnngagtgcaanntttttttttttttttttttttttttttttt

SEQ ID NO: 5395 - DNA, 84 bp, synthetic construct
  source 1..84: mol_type = other DNA
tttttttaagcagtggtatcaacgcagagtacnngtcataggnnacggtaacnntttttttttttttttttttttttttttttt

SEQ ID NO: 5396 - DNA, 84 bp, synthetic construct
  source 1..84: mol_type = other DNA
tttttttaagcagtggtatcaacgcagagtacnngtcataggnnaagtggtgnntttttttttttttttttttttttttttttt

SEQ ID NO: 5397 - DNA, 84 bp, synthetic construct
  source 1..84: mol_type = other DNA
tttttttaagcagtggtatcaacgcagagtacnngtcataggnnggagacaanntttttttttttttttttttttttttttttt

SEQ ID NO: 5398 - DNA, 84 bp, synthetic construct
  source 1..84: mol_type = other DNA
tttttttaagcagtggtatcaacgcagagtacnngtcataggnntcaaggacnntttttttttttttttttttttttttttttt

SEQ ID NO: 5399 - DNA, 84 bp, synthetic construct
  source 1..84: mol_type = other DNA
tttttttaagcagtggtatcaacgcagagtacnngtcataggnnaagagagcnntttttttttttttttttttttttttttttt

SEQ ID NO: 5400 - DNA, 84 bp, synthetic construct
  source 1..84: mol_type = other DNA
tttttttaagcagtggtatcaacgcagagtacnngtcataggnncgagagatnntttttttttttttttttttttttttttttt

SEQ ID NO: 5401 - DNA, 84 bp, synthetic construct
  source 1..84: mol_type = other DNA
tttttttaagcagtggtatcaacgcagagtacnngtcataggnnacagatggnntttttttttttttttttttttttttttttt

SEQ ID NO: 5402 - DNA, 84 bp, synthetic construct
  source 1..84: mol_type = other DNA
tttttttaagcagtggtatcaacgcagagtacnngtcataggnnaggagtcanntttttttttttttttttttttttttttttt

SEQ ID NO: 5403 - DNA, 84 bp, synthetic construct
  source 1..84: mol_type = other DNA
tttttttaagcagtggtatcaacgcagagtacnngtcataggnncgtgttacnntttttttttttttttttttttttttttttt

SEQ ID NO: 5404 - DNA, 84 bp, synthetic construct
  source 1..84: mol_type = other DNA
tttttttaagcagtggtatcaacgcagagtacnngtcataggnntagtgtgcnntttttttttttttttttttttttttttttt

SEQ ID NO: 5405 - DNA, 84 bp, synthetic construct
  source 1..84: mol_type = other DNA
tttttttaagcagtggtatcaacgcagagtacnngtcataggnnctcatgacnntttttttttttttttttttttttttttttt

SEQ ID NO: 5406 - DNA, 84 bp, synthetic construct
  source 1..84: mol_type = other DNA
tttttttaagcagtggtatcaacgcagagtacnngtcataggnngtatccagnntttttttttttttttttttttttttttttt

SEQ ID NO: 5407 - DNA, 84 bp, synthetic construct
  source 1..84: mol_type = other DNA
tttttttaagcagtggtatcaacgcagagtacnngtcataggnnacgcctatnntttttttttttttttttttttttttttttt

SEQ ID NO: 5408 - DNA, 84 bp, synthetic construct
  source 1..84: mol_type = other DNA
tttttttaagcagtggtatcaacgcagagtacnngtcataggnnaacgacctnntttttttttttttttttttttttttttttt

SEQ ID NO: 5409 - DNA, 84 bp, synthetic construct
  source 1..84: mol_type = other DNA
tttttttaagcagtggtatcaacgcagagtacnngtcataggnnatcaggctnntttttttttttttttttttttttttttttt

SEQ ID NO: 5410 - DNA, 84 bp, synthetic construct
  source 1..84: mol_type = other DNA
tttttttaagcagtggtatcaacgcagagtacnngtcataggnncaagttcgnntttttttttttttttttttttttttttttt

SEQ ID NO: 5411 - DNA, 84 bp, synthetic construct
  source 1..84: mol_type = other DNA
tttttttaagcagtggtatcaacgcagagtacnngtcataggnntagccaganntttttttttttttttttttttttttttttt

SEQ ID NO: 5412 - DNA, 84 bp, synthetic construct
  source 1..84: mol_type = other DNA
tttttttaagcagtggtatcaacgcagagtacnngtcataggnncaatcacgnntttttttttttttttttttttttttttttt

SEQ ID NO: 5413 - DNA, 84 bp, synthetic construct
  source 1..84: mol_type = other DNA
tttttttaagcagtggtatcaacgcagagtacnngtcataggnngcaacaagnntttttttttttttttttttttttttttttt

SEQ ID NO: 5414 - DNA, 84 bp, synthetic construct
  source 1..84: mol_type = other DNA
tttttttaagcagtggtatcaacgcagagtacnngtcataggnncacgacaanntttttttttttttttttttttttttttttt

SEQ ID NO: 5415 - DNA, 84 bp, synthetic construct
  source 1..84: mol_type = other DNA
tttttttaagcagtggtatcaacgcagagtacnngtcataggnntacggaganntttttttttttttttttttttttttttttt

SEQ ID NO: 5416 - DNA, 84 bp, synthetic construct
  source 1..84: mol_type = other DNA
tttttttaagcagtggtatcaacgcagagtacnngtcataggnncgacaaganntttttttttttttttttttttttttttttt

SEQ ID NO: 5417 - DNA, 84 bp, synthetic construct
  source 1..84: mol_type = other DNA
tttttttaagcagtggtatcaacgcagagtacnngtcataggnncgaagtganntttttttttttttttttttttttttttttt

SEQ ID NO: 5418 - DNA, 84 bp, synthetic construct
  source 1..84: mol_type = other DNA
tttttttaagcagtggtatcaacgcagagtacnngtcataggnnagctggtanntttttttttttttttttttttttttttttt

SEQ ID NO: 5419 - DNA, 84 bp, synthetic construct
  source 1..84: mol_type = other DNA
tttttttaagcagtggtatcaacgcagagtacnngtcataggnnaactaggcnntttttttttttttttttttttttttttttt

SEQ ID NO: 5420 - DNA, 84 bp, synthetic construct
  source 1..84: mol_type = other DNA
tttttttaagcagtggtatcaacgcagagtacnngtcataggnncagcaagtnntttttttttttttttttttttttttttttt

SEQ ID NO: 5421 - DNA, 84 bp, synthetic construct
  source 1..84: mol_type = other DNA
tttttttaagcagtggtatcaacgcagagtacnngtcataggnnacgaggtanntttttttttttttttttttttttttttttt

SEQ ID NO: 5422 - DNA, 84 bp, synthetic construct
  source 1..84: mol_type = other DNA
tttttttaagcagtggtatcaacgcagagtacnngtcataggnncatcttccnntttttttttttttttttttttttttttttt

SEQ ID NO: 5423 - DNA, 84 bp, synthetic construct
  source 1..84: mol_type = other DNA
tttttttaagcagtggtatcaacgcagagtacnngtcataggnncctgaatcnntttttttttttttttttttttttttttttt

SEQ ID NO: 5424 - DNA, 84 bp, synthetic construct
  source 1..84: mol_type = other DNA
tttttttaagcagtggtatcaacgcagagtacnngtcataggnntgcagactnntttttttttttttttttttttttttttttt

SEQ ID NO: 5425 - DNA, 84 bp, synthetic construct
  source 1..84: mol_type = other DNA
tttttttaagcagtggtatcaacgcagagtacnngtcataggnnagatgtggnntttttttttttttttttttttttttttttt

SEQ ID NO: 5426 - DNA, 84 bp, synthetic construct
  source 1..84: mol_type = other DNA
tttttttaagcagtggtatcaacgcagagtacnngtcataggnnagttcgacnntttttttttttttttttttttttttttttt

SEQ ID NO: 5427 - DNA, 84 bp, synthetic construct
  source 1..84: mol_type = other DNA
tttttttaagcagtggtatcaacgcagagtacnngtcataggnnacaacctcnntttttttttttttttttttttttttttttt

SEQ ID NO: 5428 - DNA, 84 bp, synthetic construct
  source 1..84: mol_type = other DNA
tttttttaagcagtggtatcaacgcagagtacnngtcataggnncatggtagnntttttttttttttttttttttttttttttt

SEQ ID NO: 5429 - DNA, 84 bp, synthetic construct
  source 1..84: mol_type = other DNA
tttttttaagcagtggtatcaacgcagagtacnngtcataggnncgtatctcnntttttttttttttttttttttttttttttt

SEQ ID NO: 5430 - DNA, 84 bp, synthetic construct
  source 1..84: mol_type = other DNA
tttttttaagcagtggtatcaacgcagagtacnngtcataggnncctagttcnntttttttttttttttttttttttttttttt

SEQ ID NO: 5431 - DNA, 84 bp, synthetic construct
  source 1..84: mol_type = other DNA
tttttttaagcagtggtatcaacgcagagtacnngtcataggnncaagagtcnntttttttttttttttttttttttttttttt

SEQ ID NO: 5432 - DNA, 84 bp, synthetic construct
  source 1..84: mol_type = other DNA
tttttttaagcagtggtatcaacgcagagtacnngaacggaannaatcggcanntttttttttttttttttttttttttttttt

SEQ ID NO: 5433 - DNA, 84 bp, synthetic construct
  source 1..84: mol_type = other DNA
tttttttaagcagtggtatcaacgcagagtacnngaacggaanntacggcatnntttttttttttttttttttttttttttttt

SEQ ID NO: 5434 - DNA, 84 bp, synthetic construct
  source 1..84: mol_type = other DNA
tttttttaagcagtggtatcaacgcagagtacnngaacggaannttggatcgnntttttttttttttttttttttttttttttt

SEQ ID NO: 5435 - DNA, 84 bp, synthetic construct
  source 1..84: mol_type = other DNA
tttttttaagcagtggtatcaacgcagagtacnngaacggaanntggaacganntttttttttttttttttttttttttttttt

SEQ ID NO: 5436 - DNA, 84 bp, synthetic construct
  source 1..84: mol_type = other DNA
tttttttaagcagtggtatcaacgcagagtacnngaacggaannggcaatcanntttttttttttttttttttttttttttttt

SEQ ID NO: 5437 - DNA, 84 bp, synthetic construct
  source 1..84: mol_type = other DNA
tttttttaagcagtggtatcaacgcagagtacnngaacggaanngaatccganntttttttttttttttttttttttttttttt

SEQ ID NO: 5438 - DNA, 84 bp, synthetic construct
  source 1..84: mol_type = other DNA
tttttttaagcagtggtatcaacgcagagtacnngaacggaannttacggtgnntttttttttttttttttttttttttttttt

SEQ ID NO: 5439 - DNA, 84 bp, synthetic construct
  source 1..84: mol_type = other DNA
tttttttaagcagtggtatcaacgcagagtacnngaacggaanncatatcggnntttttttttttttttttttttttttttttt

SEQ ID NO: 5440 - DNA, 84 bp, synthetic construct
  source 1..84: mol_type = other DNA
tttttttaagcagtggtatcaacgcagagtacnngaacggaanncttcggtanntttttttttttttttttttttttttttttt

SEQ ID NO: 5441 - DNA, 84 bp, synthetic construct
  source 1..84: mol_type = other DNA
tttttttaagcagtggtatcaacgcagagtacnngaacggaanntcctaacgnntttttttttttttttttttttttttttttt

SEQ ID NO: 5442 - DNA, 84 bp, synthetic construct
  source 1..84: mol_type = other DNA
tttttttaagcagtggtatcaacgcagagtacnngaacggaanngtaagccanntttttttttttttttttttttttttttttt

SEQ ID NO: 5443 - DNA, 84 bp, synthetic construct
  source 1..84: mol_type = other DNA
tttttttaagcagtggtatcaacgcagagtacnngaacggaanntaaggtggnntttttttttttttttttttttttttttttt

SEQ ID NO: 5444 - DNA, 84 bp, synthetic construct
  source 1..84: mol_type = other DNA
tttttttaagcagtggtatcaacgcagagtacnngaacggaannggtaagctnntttttttttttttttttttttttttttttt

SEQ ID NO: 5445 - DNA, 84 bp, synthetic construct
  source 1..84: mol_type = other DNA
tttttttaagcagtggtatcaacgcagagtacnngaacggaanntgtgtcganntttttttttttttttttttttttttttttt

SEQ ID NO: 5446 - DNA, 84 bp, synthetic construct
  source 1..84: mol_type = other DNA
tttttttaagcagtggtatcaacgcagagtacnngaacggaanngagcatganntttttttttttttttttttttttttttttt

SEQ ID NO: 5447 - DNA, 84 bp, synthetic construct
  source 1..84: mol_type = other DNA
tttttttaagcagtggtatcaacgcagagtacnngaacggaanntcgaagtcnntttttttttttttttttttttttttttttt

SEQ ID NO: 5448 - DNA, 84 bp, synthetic construct
  source 1..84: mol_type = other DNA
tttttttaagcagtggtatcaacgcagagtacnngaacggaannggtgaacanntttttttttttttttttttttttttttttt

SEQ ID NO: 5449 - DNA, 84 bp, synthetic construct
  source 1..84: mol_type = other DNA
tttttttaagcagtggtatcaacgcagagtacnngaacggaannacatgcacnntttttttttttttttttttttttttttttt

SEQ ID NO: 5450 - DNA, 84 bp, synthetic construct
  source 1..84: mol_type = other DNA
tttttttaagcagtggtatcaacgcagagtacnngaacggaannccaacagtnntttttttttttttttttttttttttttttt

SEQ ID NO: 5451 - DNA, 84 bp, synthetic construct
  source 1..84: mol_type = other DNA
tttttttaagcagtggtatcaacgcagagtacnngaacggaannagaacagcnntttttttttttttttttttttttttttttt

SEQ ID NO: 5452 - DNA, 84 bp, synthetic construct
  source 1..84: mol_type = other DNA
tttttttaagcagtggtatcaacgcagagtacnngaacggaanngaacacgtnntttttttttttttttttttttttttttttt

SEQ ID NO: 5453 - DNA, 84 bp, synthetic construct
  source 1..84: mol_type = other DNA
tttttttaagcagtggtatcaacgcagagtacnngaacggaannggtcttcanntttttttttttttttttttttttttttttt

SEQ ID NO: 5454 - DNA, 84 bp, synthetic construct
  source 1..84: mol_type = other DNA
tttttttaagcagtggtatcaacgcagagtacnngaacggaannaggttcagnntttttttttttttttttttttttttttttt

SEQ ID NO: 5455 - DNA, 84 bp, synthetic construct
  source 1..84: mol_type = other DNA
tttttttaagcagtggtatcaacgcagagtacnngaacggaannctagagcanntttttttttttttttttttttttttttttt

SEQ ID NO: 5456 - DNA, 84 bp, synthetic construct
  source 1..84: mol_type = other DNA
tttttttaagcagtggtatcaacgcagagtacnngaacggaanncttctagcnntttttttttttttttttttttttttttttt

SEQ ID NO: 5457 - DNA, 84 bp, synthetic construct
  source 1..84: mol_type = other DNA
tttttttaagcagtggtatcaacgcagagtacnngaacggaanngagtaacgnntttttttttttttttttttttttttttttt

SEQ ID NO: 5458 - DNA, 84 bp, synthetic construct
  source 1..84: mol_type = other DNA
tttttttaagcagtggtatcaacgcagagtacnngaacggaannctaagaggnntttttttttttttttttttttttttttttt

SEQ ID NO: 5459 - DNA, 84 bp, synthetic construct
  source 1..84: mol_type = other DNA
tttttttaagcagtggtatcaacgcagagtacnngaacggaannacgtgtagnntttttttttttttttttttttttttttttt

SEQ ID NO: 5460 - DNA, 84 bp, synthetic construct
  source 1..84: mol_type = other DNA
tttttttaagcagtggtatcaacgcagagtacnngaacggaannactacaggnntttttttttttttttttttttttttttttt

SEQ ID NO: 5461 - DNA, 84 bp, synthetic construct
  source 1..84: mol_type = other DNA
tttttttaagcagtggtatcaacgcagagtacnngaacggaanntacaggtcnntttttttttttttttttttttttttttttt

SEQ ID NO: 5462 - DNA, 84 bp, synthetic construct
  source 1..84: mol_type = other DNA
tttttttaagcagtggtatcaacgcagagtacnngaacggaannctcacatgnntttttttttttttttttttttttttttttt

SEQ ID NO: 5463 - DNA, 84 bp, synthetic construct
  source 1..84: mol_type = other DNA
tttttttaagcagtggtatcaacgcagagtacnngaacggaannactaggagnntttttttttttttttttttttttttttttt

SEQ ID NO: 5464 - DNA, 84 bp, synthetic construct
  source 1..84: mol_type = other DNA
tttttttaagcagtggtatcaacgcagagtacnngaacggaannccatagganntttttttttttttttttttttttttttttt

SEQ ID NO: 5465 - DNA, 84 bp, synthetic construct
  source 1..84: mol_type = other DNA
tttttttaagcagtggtatcaacgcagagtacnngaacggaannggagaatcnntttttttttttttttttttttttttttttt

SEQ ID NO: 5466 - DNA, 84 bp, synthetic construct
  source 1..84: mol_type = other DNA
tttttttaagcagtggtatcaacgcagagtacnngaacggaanngccaagaanntttttttttttttttttttttttttttttt

SEQ ID NO: 5467 - DNA, 84 bp, synthetic construct
  source 1..84: mol_type = other DNA
tttttttaagcagtggtatcaacgcagagtacnngaacggaannaaggcaagnntttttttttttttttttttttttttttttt

SEQ ID NO: 5468 - DNA, 84 bp, synthetic construct
  source 1..84: mol_type = other DNA
tttttttaagcagtggtatcaacgcagagtacnngaacggaannaatgtcgcnntttttttttttttttttttttttttttttt

SEQ ID NO: 5469 - DNA, 84 bp, synthetic construct
  source 1..84: mol_type = other DNA
tttttttaagcagtggtatcaacgcagagtacnngaacggaannatggaaccnntttttttttttttttttttttttttttttt

SEQ ID NO: 5470 - DNA, 84 bp, synthetic construct
  source 1..84: mol_type = other DNA
tttttttaagcagtggtatcaacgcagagtacnngaacggaannagaggcatnntttttttttttttttttttttttttttttt

SEQ ID NO: 5471 - DNA, 84 bp, synthetic construct
  source 1..84: mol_type = other DNA
tttttttaagcagtggtatcaacgcagagtacnngaacggaanntgcatagcnntttttttttttttttttttttttttttttt

SEQ ID NO: 5472 - DNA, 84 bp, synthetic construct
  source 1..84: mol_type = other DNA
tttttttaagcagtggtatcaacgcagagtacnngaacggaannctaacgganntttttttttttttttttttttttttttttt

SEQ ID NO: 5473 - DNA, 84 bp, synthetic construct
  source 1..84: mol_type = other DNA
tttttttaagcagtggtatcaacgcagagtacnngaacggaanntatcgaggnntttttttttttttttttttttttttttttt

SEQ ID NO: 5474 - DNA, 84 bp, synthetic construct
  source 1..84: mol_type = other DNA
tttttttaagcagtggtatcaacgcagagtacnngaacggaanncatagcctnntttttttttttttttttttttttttttttt

SEQ ID NO: 5475 - DNA, 84 bp, synthetic construct
  source 1..84: mol_type = other DNA
tttttttaagcagtggtatcaacgcagagtacnngaacggaannatcgagacnntttttttttttttttttttttttttttttt

SEQ ID NO: 5476 - DNA, 84 bp, synthetic construct
  source 1..84: mol_type = other DNA
tttttttaagcagtggtatcaacgcagagtacnngaacggaannggaagagtnntttttttttttttttttttttttttttttt

SEQ ID NO: 5477 - DNA, 84 bp, synthetic construct
  source 1..84: mol_type = other DNA
tttttttaagcagtggtatcaacgcagagtacnngaacggaannccaagtagnntttttttttttttttttttttttttttttt

SEQ ID NO: 5478 - DNA, 84 bp, synthetic construct
  source 1..84: mol_type = other DNA
tttttttaagcagtggtatcaacgcagagtacnngaacggaannctgaacagnntttttttttttttttttttttttttttttt

SEQ ID NO: 5479 - DNA, 84 bp, synthetic construct
  source 1..84: mol_type = other DNA
tttttttaagcagtggtatcaacgcagagtacnngaacggaanngtaggttcnntttttttttttttttttttttttttttttt

SEQ ID NO: 5480 - DNA, 84 bp, synthetic construct
  source 1..84: mol_type = other DNA
tttttttaagcagtggtatcaacgcagagtacnngaacggaanngtatggacnntttttttttttttttttttttttttttttt

SEQ ID NO: 5481 - DNA, 84 bp, synthetic construct
  source 1..84: mol_type = other DNA
tttttttaagcagtggtatcaacgcagagtacnngaacggaanntcgcaacanntttttttttttttttttttttttttttttt

SEQ ID NO: 5482 - DNA, 84 bp, synthetic construct
  source 1..84: mol_type = other DNA
tttttttaagcagtggtatcaacgcagagtacnngaacggaannccgctaatnntttttttttttttttttttttttttttttt

SEQ ID NO: 5483 - DNA, 84 bp, synthetic construct
  source 1..84: mol_type = other DNA
tttttttaagcagtggtatcaacgcagagtacnngaacggaanngattcgcanntttttttttttttttttttttttttttttt

SEQ ID NO: 5484 - DNA, 84 bp, synthetic construct
  source 1..84: mol_type = other DNA
tttttttaagcagtggtatcaacgcagagtacnngaacggaanncgatggaanntttttttttttttttttttttttttttttt

SEQ ID NO: 5485 - DNA, 84 bp, synthetic construct
  source 1..84: mol_type = other DNA
tttttttaagcagtggtatcaacgcagagtacnngaacggaannagcaagganntttttttttttttttttttttttttttttt

SEQ ID NO: 5486 - DNA, 84 bp, synthetic construct
  source 1..84: mol_type = other DNA
tttttttaagcagtggtatcaacgcagagtacnngaacggaanncgtagcaanntttttttttttttttttttttttttttttt

SEQ ID NO: 5487 - DNA, 84 bp, synthetic construct
  source 1..84: mol_type = other DNA
tttttttaagcagtggtatcaacgcagagtacnngaacggaanntggcagtanntttttttttttttttttttttttttttttt

SEQ ID NO: 5488 - DNA, 84 bp, synthetic construct
  source 1..84: mol_type = other DNA
tttttttaagcagtggtatcaacgcagagtacnngaacggaanncggtagttnntttttttttttttttttttttttttttttt

SEQ ID NO: 5489 - DNA, 84 bp, synthetic construct
  source 1..84: mol_type = other DNA
tttttttaagcagtggtatcaacgcagagtacnngaacggaanntgacttcgnntttttttttttttttttttttttttttttt

SEQ ID NO: 5490 - DNA, 84 bp, synthetic construct
  source 1..84: mol_type = other DNA
tttttttaagcagtggtatcaacgcagagtacnngaacggaanngagtgcaanntttttttttttttttttttttttttttttt

SEQ ID NO: 5491 - DNA, 84 bp, synthetic construct
  source 1..84: mol_type = other DNA
tttttttaagcagtggtatcaacgcagagtacnngaacggaannacggtaacnntttttttttttttttttttttttttttttt

SEQ ID NO: 5492 - DNA, 84 bp, synthetic construct
  source 1..84: mol_type = other DNA
tttttttaagcagtggtatcaacgcagagtacnngaacggaannaagtggtgnntttttttttttttttttttttttttttttt

SEQ ID NO: 5493 - DNA, 84 bp, synthetic construct
  source 1..84: mol_type = other DNA
tttttttaagcagtggtatcaacgcagagtacnngaacggaannggagacaanntttttttttttttttttttttttttttttt

SEQ ID NO: 5494 - DNA, 84 bp, synthetic construct
  source 1..84: mol_type = other DNA
tttttttaagcagtggtatcaacgcagagtacnngaacggaanntcaaggacnntttttttttttttttttttttttttttttt

SEQ ID NO: 5495 - DNA, 84 bp, synthetic construct
  source 1..84: mol_type = other DNA
tttttttaagcagtggtatcaacgcagagtacnngaacggaannaagagagcnntttttttttttttttttttttttttttttt

SEQ ID NO: 5496 - DNA, 84 bp, synthetic construct
  source 1..84: mol_type = other DNA
tttttttaagcagtggtatcaacgcagagtacnngaacggaanncgagagatnntttttttttttttttttttttttttttttt

SEQ ID NO: 5497 - DNA, 84 bp, synthetic construct
  source 1..84: mol_type = other DNA
tttttttaagcagtggtatcaacgcagagtacnngaacggaannacagatggnntttttttttttttttttttttttttttttt

SEQ ID NO: 5498 - DNA, 84 bp, synthetic construct
  source 1..84: mol_type = other DNA
tttttttaagcagtggtatcaacgcagagtacnngaacggaannaggagtcanntttttttttttttttttttttttttttttt

SEQ ID NO: 5499 - DNA, 84 bp, synthetic construct
  source 1..84: mol_type = other DNA
tttttttaagcagtggtatcaacgcagagtacnngaacggaanncgtgttacnntttttttttttttttttttttttttttttt

SEQ ID NO: 5500 - DNA, 84 bp, synthetic construct
  source 1..84: mol_type = other DNA
tttttttaagcagtggtatcaacgcagagtacnngaacggaanntagtgtgcnntttttttttttttttttttttttttttttt

SEQ ID NO: 5501 - DNA, 84 bp, synthetic construct
  source 1..84: mol_type = other DNA
tttttttaagcagtggtatcaacgcagagtacnngaacggaannctcatgacnntttttttttttttttttttttttttttttt

SEQ ID NO: 5502 - DNA, 84 bp, synthetic construct
  source 1..84: mol_type = other DNA
tttttttaagcagtggtatcaacgcagagtacnngaacggaanngtatccagnntttttttttttttttttttttttttttttt

SEQ ID NO: 5503 - DNA, 84 bp, synthetic construct
  source 1..84: mol_type = other DNA
tttttttaagcagtggtatcaacgcagagtacnngaacggaannacgcctatnntttttttttttttttttttttttttttttt

SEQ ID NO: 5504 - DNA, 84 bp, synthetic construct
  source 1..84: mol_type = other DNA
tttttttaagcagtggtatcaacgcagagtacnngaacggaannaacgacctnntttttttttttttttttttttttttttttt

SEQ ID NO: 5505 - DNA, 84 bp, synthetic construct
  source 1..84: mol_type = other DNA
tttttttaagcagtggtatcaacgcagagtacnngaacggaannatcaggctnntttttttttttttttttttttttttttttt

SEQ ID NO: 5506 - DNA, 84 bp, synthetic construct
  source 1..84: mol_type = other DNA
tttttttaagcagtggtatcaacgcagagtacnngaacggaanncaagttcgnntttttttttttttttttttttttttttttt

SEQ ID NO: 5507 - DNA, 84 bp, synthetic construct
  source 1..84: mol_type = other DNA
tttttttaagcagtggtatcaacgcagagtacnngaacggaanntagccaganntttttttttttttttttttttttttttttt

SEQ ID NO: 5508 - DNA, 84 bp, synthetic construct
  source 1..84: mol_type = other DNA
tttttttaagcagtggtatcaacgcagagtacnngaacggaanncaatcacgnntttttttttttttttttttttttttttttt

SEQ ID NO: 5509 - DNA, 84 bp, synthetic construct
  source 1..84: mol_type = other DNA
tttttttaagcagtggtatcaacgcagagtacnngaacggaanngcaacaagnntttttttttttttttttttttttttttttt

SEQ ID NO: 5510 - DNA, 84 bp, synthetic construct
  source 1..84: mol_type = other DNA
tttttttaagcagtggtatcaacgcagagtacnngaacggaanncacgacaanntttttttttttttttttttttttttttttt

SEQ ID NO: 5511 - DNA, 84 bp, synthetic construct
  source 1..84: mol_type = other DNA
tttttttaagcagtggtatcaacgcagagtacnngaacggaanntacggaganntttttttttttttttttttttttttttttt

SEQ ID NO: 5512 - DNA, 84 bp, synthetic construct
  source 1..84: mol_type = other DNA
tttttttaagcagtggtatcaacgcagagtacnngaacggaanncgacaaganntttttttttttttttttttttttttttttt

SEQ ID NO: 5513 - DNA, 84 bp, synthetic construct
  source 1..84: mol_type = other DNA
tttttttaagcagtggtatcaacgcagagtacnngaacggaanncgaagtganntttttttttttttttttttttttttttttt

SEQ ID NO: 5514 - DNA, 84 bp, synthetic construct
  source 1..84: mol_type = other DNA
tttttttaagcagtggtatcaacgcagagtacnngaacggaannagctggtanntttttttttttttttttttttttttttttt

SEQ ID NO: 5515 - DNA, 84 bp, synthetic construct
  source 1..84: mol_type = other DNA
tttttttaagcagtggtatcaacgcagagtacnngaacggaannaactaggcnntttttttttttttttttttttttttttttt

SEQ ID NO: 5516 - DNA, 84 bp, synthetic construct
  source 1..84: mol_type = other DNA
tttttttaagcagtggtatcaacgcagagtacnngaacggaanncagcaagtnntttttttttttttttttttttttttttttt

SEQ ID NO: 5517 - DNA, 84 bp, synthetic construct
  source 1..84: mol_type = other DNA
tttttttaagcagtggtatcaacgcagagtacnngaacggaannacgaggtanntttttttttttttttttttttttttttttt

SEQ ID NO: 5518 - DNA, 84 bp, synthetic construct
  source 1..84: mol_type = other DNA
tttttttaagcagtggtatcaacgcagagtacnngaacggaanncatcttccnntttttttttttttttttttttttttttttt

SEQ ID NO: 5519 - DNA, 84 bp, synthetic construct
  source 1..84: mol_type = other DNA
tttttttaagcagtggtatcaacgcagagtacnngaacggaanncctgaatcnntttttttttttttttttttttttttttttt

SEQ ID NO: 5520 - DNA, 84 bp, synthetic construct
  source 1..84: mol_type = other DNA
tttttttaagcagtggtatcaacgcagagtacnngaacggaanntgcagactnntttttttttttttttttttttttttttttt

SEQ ID NO: 5521 - DNA, 84 bp, synthetic construct
  source 1..84: mol_type = other DNA
tttttttaagcagtggtatcaacgcagagtacnngaacggaannagatgtggnntttttttttttttttttttttttttttttt

SEQ ID NO: 5522 - DNA, 84 bp, synthetic construct
  source 1..84: mol_type = other DNA
tttttttaagcagtggtatcaacgcagagtacnngaacggaannagttcgacnntttttttttttttttttttttttttttttt

SEQ ID NO: 5523 - DNA, 84 bp, synthetic construct
  source 1..84: mol_type = other DNA
tttttttaagcagtggtatcaacgcagagtacnngaacggaannacaacctcnntttttttttttttttttttttttttttttt

SEQ ID NO: 5524 - DNA, 84 bp, synthetic construct
  source 1..84: mol_type = other DNA
tttttttaagcagtggtatcaacgcagagtacnngaacggaanncatggtagnntttttttttttttttttttttttttttttt

SEQ ID NO: 5525 - DNA, 84 bp, synthetic construct
  source 1..84: mol_type = other DNA
tttttttaagcagtggtatcaacgcagagtacnngaacggaanncgtatctcnntttttttttttttttttttttttttttttt

SEQ ID NO: 5526 - DNA, 84 bp, synthetic construct
  source 1..84: mol_type = other DNA
tttttttaagcagtggtatcaacgcagagtacnngaacggaanncctagttcnntttttttttttttttttttttttttttttt

SEQ ID NO: 5527 - DNA, 84 bp, synthetic construct
  source 1..84: mol_type = other DNA
tttttttaagcagtggtatcaacgcagagtacnngaacggaanncaagagtcnntttttttttttttttttttttttttttttt

SEQ ID NO: 5528 - DNA, 84 bp, synthetic construct
  source 1..84: mol_type = other DNA
tttttttaagcagtggtatcaacgcagagtacnnaatggacgnnaatcggcanntttttttttttttttttttttttttttttt

SEQ ID NO: 5529 - DNA, 84 bp, synthetic construct
  source 1..84: mol_type = other DNA
tttttttaagcagtggtatcaacgcagagtacnnaatggacgnntacggcatnntttttttttttttttttttttttttttttt

SEQ ID NO: 5530 - DNA, 84 bp, synthetic construct
  source 1..84: mol_type = other DNA
tttttttaagcagtggtatcaacgcagagtacnnaatggacgnnttggatcgnntttttttttttttttttttttttttttttt

SEQ ID NO: 5531 - DNA, 84 bp, synthetic construct
  source 1..84: mol_type = other DNA
tttttttaagcagtggtatcaacgcagagtacnnaatggacgnntggaacganntttttttttttttttttttttttttttttt

SEQ ID NO: 5532 - DNA, 84 bp, synthetic construct
  source 1..84: mol_type = other DNA
tttttttaagcagtggtatcaacgcagagtacnnaatggacgnnggcaatcanntttttttttttttttttttttttttttttt

SEQ ID NO: 5533 - DNA, 84 bp, synthetic construct
  source 1..84: mol_type = other DNA
tttttttaagcagtggtatcaacgcagagtacnnaatggacgnngaatccganntttttttttttttttttttttttttttttt

SEQ ID NO: 5534 - DNA, 84 bp, synthetic construct
  source 1..84: mol_type = other DNA
tttttttaagcagtggtatcaacgcagagtacnnaatggacgnnttacggtgnntttttttttttttttttttttttttttttt

SEQ ID NO: 5535 - DNA, 84 bp, synthetic construct
  source 1..84: mol_type = other DNA
tttttttaagcagtggtatcaacgcagagtacnnaatggacgnncatatcggnntttttttttttttttttttttttttttttt

SEQ ID NO: 5536 - DNA, 84 bp, synthetic construct
  source 1..84: mol_type = other DNA
tttttttaagcagtggtatcaacgcagagtacnnaatggacgnncttcggtanntttttttttttttttttttttttttttttt

SEQ ID NO: 5537 - DNA, 84 bp, synthetic construct
  source 1..84: mol_type = other DNA
tttttttaagcagtggtatcaacgcagagtacnnaatggacgnntcctaacgnntttttttttttttttttttttttttttttt

SEQ ID NO: 5538 - DNA, 84 bp, synthetic construct
  source 1..84: mol_type = other DNA
tttttttaagcagtggtatcaacgcagagtacnnaatggacgnngtaagccanntttttttttttttttttttttttttttttt

SEQ ID NO: 5539 - DNA, 84 bp, synthetic construct
  source 1..84: mol_type = other DNA
tttttttaagcagtggtatcaacgcagagtacnnaatggacgnntaaggtggnntttttttttttttttttttttttttttttt

SEQ ID NO: 5540 - DNA, 84 bp, synthetic construct
  source 1..84: mol_type = other DNA
tttttttaagcagtggtatcaacgcagagtacnnaatggacgnnggtaagctnntttttttttttttttttttttttttttttt

SEQ ID NO: 5541 - DNA, 84 bp, synthetic construct
  source 1..84: mol_type = other DNA
tttttttaagcagtggtatcaacgcagagtacnnaatggacgnntgtgtcganntttttttttttttttttttttttttttttt

SEQ ID NO: 5542 - DNA, 84 bp, synthetic construct
  source 1..84: mol_type = other DNA
tttttttaagcagtggtatcaacgcagagtacnnaatggacgnngagcatganntttttttttttttttttttttttttttttt

SEQ ID NO: 5543 - DNA, 84 bp, synthetic construct
  source 1..84: mol_type = other DNA
tttttttaagcagtggtatcaacgcagagtacnnaatggacgnntcgaagtcnntttttttttttttttttttttttttttttt

SEQ ID NO: 5544 - DNA, 84 bp, synthetic construct
  source 1..84: mol_type = other DNA
tttttttaagcagtggtatcaacgcagagtacnnaatggacgnnggtgaacanntttttttttttttttttttttttttttttt

SEQ ID NO: 5545 - DNA, 84 bp, synthetic construct
  source 1..84: mol_type = other DNA
tttttttaagcagtggtatcaacgcagagtacnnaatggacgnnacatgcacnntttttttttttttttttttttttttttttt

SEQ ID NO: 5546 - DNA, 84 bp, synthetic construct
  source 1..84: mol_type = other DNA
tttttttaagcagtggtatcaacgcagagtacnnaatggacgnnccaacagtnntttttttttttttttttttttttttttttt

SEQ ID NO: 5547 - DNA, 84 bp, synthetic construct
  source 1..84: mol_type = other DNA
tttttttaagcagtggtatcaacgcagagtacnnaatggacgnnagaacagcnntttttttttttttttttttttttttttttt

SEQ ID NO: 5548 - DNA, 84 bp, synthetic construct
  source 1..84: mol_type = other DNA
tttttttaagcagtggtatcaacgcagagtacnnaatggacgnngaacacgtnntttttttttttttttttttttttttttttt

SEQ ID NO: 5549 - DNA, 84 bp, synthetic construct
  source 1..84: mol_type = other DNA
tttttttaagcagtggtatcaacgcagagtacnnaatggacgnnggtcttcanntttttttttttttttttttttttttttttt

SEQ ID NO: 5550 - DNA, 84 bp, synthetic construct
  source 1..84: mol_type = other DNA
tttttttaagcagtggtatcaacgcagagtacnnaatggacgnnaggttcagnntttttttttttttttttttttttttttttt

SEQ ID NO: 5551 - DNA, 84 bp, synthetic construct
  source 1..84: mol_type = other DNA
tttttttaagcagtggtatcaacgcagagtacnnaatggacgnnctagagcanntttttttttttttttttttttttttttttt

SEQ ID NO: 5552 - DNA, 84 bp, synthetic construct
  source 1..84: mol_type = other DNA
tttttttaagcagtggtatcaacgcagagtacnnaatggacgnncttctagcnntttttttttttttttttttttttttttttt

SEQ ID NO: 5553 - DNA, 84 bp, synthetic construct
  source 1..84: mol_type = other DNA
tttttttaagcagtggtatcaacgcagagtacnnaatggacgnngagtaacgnntttttttttttttttttttttttttttttt

SEQ ID NO: 5554 - DNA, 84 bp, synthetic construct
  source 1..84: mol_type = other DNA
tttttttaagcagtggtatcaacgcagagtacnnaatggacgnnctaagaggnntttttttttttttttttttttttttttttt

SEQ ID NO: 5555 - DNA, 84 bp, synthetic construct
  source 1..84: mol_type = other DNA
tttttttaagcagtggtatcaacgcagagtacnnaatggacgnnacgtgtagnntttttttttttttttttttttttttttttt

SEQ ID NO: 5556 - DNA, 84 bp, synthetic construct
  source 1..84: mol_type = other DNA
tttttttaagcagtggtatcaacgcagagtacnnaatggacgnnactacaggnntttttttttttttttttttttttttttttt

SEQ ID NO: 5557 - DNA, 84 bp, synthetic construct
  source 1..84: mol_type = other DNA
tttttttaagcagtggtatcaacgcagagtacnnaatggacgnntacaggtcnntttttttttttttttttttttttttttttt

SEQ ID NO: 5558 - DNA, 84 bp, synthetic construct
  source 1..84: mol_type = other DNA
tttttttaagcagtggtatcaacgcagagtacnnaatggacgnnctcacatgnntttttttttttttttttttttttttttttt

SEQ ID NO: 5559 - DNA, 84 bp, synthetic construct
  source 1..84: mol_type = other DNA
tttttttaagcagtggtatcaacgcagagtacnnaatggacgnnactaggagnntttttttttttttttttttttttttttttt

SEQ ID NO: 5560 - DNA, 84 bp, synthetic construct
  source 1..84: mol_type = other DNA
tttttttaagcagtggtatcaacgcagagtacnnaatggacgnnccatagganntttttttttttttttttttttttttttttt

SEQ ID NO: 5561 - DNA, 84 bp, synthetic construct
  source 1..84: mol_type = other DNA
tttttttaagcagtggtatcaacgcagagtacnnaatggacgnnggagaatcnntttttttttttttttttttttttttttttt

SEQ ID NO: 5562 - DNA, 84 bp, synthetic construct
  source 1..84: mol_type = other DNA
tttttttaagcagtggtatcaacgcagagtacnnaatggacgnngccaagaanntttttttttttttttttttttttttttttt

SEQ ID NO: 5563 - DNA, 84 bp, synthetic construct
  source 1..84: mol_type = other DNA
tttttttaagcagtggtatcaacgcagagtacnnaatggacgnnaaggcaagnntttttttttttttttttttttttttttttt

SEQ ID NO: 5564 - DNA, 84 bp, synthetic construct
  source 1..84: mol_type = other DNA
tttttttaagcagtggtatcaacgcagagtacnnaatggacgnnaatgtcgcnntttttttttttttttttttttttttttttt

SEQ ID NO: 5565 - DNA, 84 bp, synthetic construct
  source 1..84: mol_type = other DNA
tttttttaagcagtggtatcaacgcagagtacnnaatggacgnnatggaaccnntttttttttttttttttttttttttttttt

SEQ ID NO: 5566 - DNA, 84 bp, synthetic construct
  source 1..84: mol_type = other DNA
tttttttaagcagtggtatcaacgcagagtacnnaatggacgnnagaggcatnntttttttttttttttttttttttttttttt

SEQ ID NO: 5567 - DNA, 84 bp, synthetic construct
  source 1..84: mol_type = other DNA
tttttttaagcagtggtatcaacgcagagtacnnaatggacgnntgcatagcnntttttttttttttttttttttttttttttt

SEQ ID NO: 5568 - DNA, 84 bp, synthetic construct
  source 1..84: mol_type = other DNA
tttttttaagcagtggtatcaacgcagagtacnnaatggacgnnctaacgganntttttttttttttttttttttttttttttt

SEQ ID NO: 5569 - DNA, 84 bp, synthetic construct
  source 1..84: mol_type = other DNA
tttttttaagcagtggtatcaacgcagagtacnnaatggacgnntatcgaggnntttttttttttttttttttttttttttttt

SEQ ID NO: 5570 - DNA, 84 bp, synthetic construct
  source 1..84: mol_type = other DNA
tttttttaagcagtggtatcaacgcagagtacnnaatggacgnncatagcctnntttttttttttttttttttttttttttttt

SEQ ID NO: 5571 - DNA, 84 bp, synthetic construct
  source 1..84: mol_type = other DNA
tttttttaagcagtggtatcaacgcagagtacnnaatggacgnnatcgagacnntttttttttttttttttttttttttttttt

SEQ ID NO: 5572 - DNA, 84 bp, synthetic construct
  source 1..84: mol_type = other DNA
tttttttaagcagtggtatcaacgcagagtacnnaatggacgnnggaagagtnntttttttttttttttttttttttttttttt

SEQ ID NO: 5573 - DNA, 84 bp, synthetic construct
  source 1..84: mol_type = other DNA
tttttttaagcagtggtatcaacgcagagtacnnaatggacgnnccaagtagnntttttttttttttttttttttttttttttt

SEQ ID NO: 5574 - DNA, 84 bp, synthetic construct
  source 1..84: mol_type = other DNA
tttttttaagcagtggtatcaacgcagagtacnnaatggacgnnctgaacagnntttttttttttttttttttttttttttttt

SEQ ID NO: 5575 - DNA, 84 bp, synthetic construct
  source 1..84: mol_type = other DNA
tttttttaagcagtggtatcaacgcagagtacnnaatggacgnngtaggttcnntttttttttttttttttttttttttttttt

SEQ ID NO: 5576 - DNA, 84 bp, synthetic construct
  source 1..84: mol_type = other DNA
tttttttaagcagtggtatcaacgcagagtacnnaatggacgnngtatggacnntttttttttttttttttttttttttttttt

SEQ ID NO: 5577 - DNA, 84 bp, synthetic construct
  source 1..84: mol_type = other DNA
tttttttaagcagtggtatcaacgcagagtacnnaatggacgnntcgcaacanntttttttttttttttttttttttttttttt

SEQ ID NO: 5578 - DNA, 84 bp, synthetic construct
  source 1..84: mol_type = other DNA
tttttttaagcagtggtatcaacgcagagtacnnaatggacgnnccgctaatnntttttttttttttttttttttttttttttt

SEQ ID NO: 5579 - DNA, 84 bp, synthetic construct
  source 1..84: mol_type = other DNA
tttttttaagcagtggtatcaacgcagagtacnnaatggacgnngattcgcanntttttttttttttttttttttttttttttt

SEQ ID NO: 5580 - DNA, 84 bp, synthetic construct
  source 1..84: mol_type = other DNA
tttttttaagcagtggtatcaacgcagagtacnnaatggacgnncgatggaanntttttttttttttttttttttttttttttt

SEQ ID NO: 5581 - DNA, 84 bp, synthetic construct
  source 1..84: mol_type = other DNA
tttttttaagcagtggtatcaacgcagagtacnnaatggacgnnagcaagganntttttttttttttttttttttttttttttt

SEQ ID NO: 5582 - DNA, 84 bp, synthetic construct
  source 1..84: mol_type = other DNA
tttttttaagcagtggtatcaacgcagagtacnnaatggacgnncgtagcaanntttttttttttttttttttttttttttttt

SEQ ID NO: 5583 - DNA, 84 bp, synthetic construct
  source 1..84: mol_type = other DNA
tttttttaagcagtggtatcaacgcagagtacnnaatggacgnntggcagtanntttttttttttttttttttttttttttttt

SEQ ID NO: 5584 - DNA, 84 bp, synthetic construct
  source 1..84: mol_type = other DNA
tttttttaagcagtggtatcaacgcagagtacnnaatggacgnncggtagttnntttttttttttttttttttttttttttttt

SEQ ID NO: 5585 - DNA, 84 bp, synthetic construct
  source 1..84: mol_type = other DNA
tttttttaagcagtggtatcaacgcagagtacnnaatggacgnntgacttcgnntttttttttttttttttttttttttttttt

SEQ ID NO: 5586 - DNA, 84 bp, synthetic construct
  source 1..84: mol_type = other DNA
tttttttaagcagtggtatcaacgcagagtacnnaatggacgnngagtgcaanntttttttttttttttttttttttttttttt

SEQ ID NO: 5587 - DNA, 84 bp, synthetic construct
  source 1..84: mol_type = other DNA
tttttttaagcagtggtatcaacgcagagtacnnaatggacgnnacggtaacnntttttttttttttttttttttttttttttt

SEQ ID NO: 5588 - DNA, 84 bp, synthetic construct
  source 1..84: mol_type = other DNA
tttttttaagcagtggtatcaacgcagagtacnnaatggacgnnaagtggtgnntttttttttttttttttttttttttttttt

SEQ ID NO: 5589 - DNA, 84 bp, synthetic construct
  source 1..84: mol_type = other DNA
tttttttaagcagtggtatcaacgcagagtacnnaatggacgnnggagacaanntttttttttttttttttttttttttttttt

SEQ ID NO: 5590 - DNA, 84 bp, synthetic construct
  source 1..84: mol_type = other DNA
tttttttaagcagtggtatcaacgcagagtacnnaatggacgnntcaaggacnntttttttttttttttttttttttttttttt

SEQ ID NO: 5591 - DNA, 84 bp, synthetic construct
  source 1..84: mol_type = other DNA
tttttttaagcagtggtatcaacgcagagtacnnaatggacgnnaagagagcnntttttttttttttttttttttttttttttt

SEQ ID NO: 5592 - DNA, 84 bp, synthetic construct
  source 1..84: mol_type = other DNA
tttttttaagcagtggtatcaacgcagagtacnnaatggacgnncgagagatnntttttttttttttttttttttttttttttt

SEQ ID NO: 5593 - DNA, 84 bp, synthetic construct
  source 1..84: mol_type = other DNA
tttttttaagcagtggtatcaacgcagagtacnnaatggacgnnacagatggnntttttttttttttttttttttttttttttt

SEQ ID NO: 5594 - DNA, 84 bp, synthetic construct
  source 1..84: mol_type = other DNA
tttttttaagcagtggtatcaacgcagagtacnnaatggacgnnaggagtcanntttttttttttttttttttttttttttttt

SEQ ID NO: 5595 - DNA, 84 bp, synthetic construct
  source 1..84: mol_type = other DNA
tttttttaagcagtggtatcaacgcagagtacnnaatggacgnncgtgttacnntttttttttttttttttttttttttttttt

SEQ ID NO: 5596 - DNA, 84 bp, synthetic construct
  source 1..84: mol_type = other DNA
tttttttaagcagtggtatcaacgcagagtacnnaatggacgnntagtgtgcnntttttttttttttttttttttttttttttt

SEQ ID NO: 5597 - DNA, 84 bp, synthetic construct
  source 1..84: mol_type = other DNA
tttttttaagcagtggtatcaacgcagagtacnnaatggacgnnctcatgacnntttttttttttttttttttttttttttttt

SEQ ID NO: 5598 - DNA, 84 bp, synthetic construct
  source 1..84: mol_type = other DNA
tttttttaagcagtggtatcaacgcagagtacnnaatggacgnngtatccagnntttttttttttttttttttttttttttttt

SEQ ID NO: 5599 - DNA, 84 bp, synthetic construct
  source 1..84: mol_type = other DNA
tttttttaagcagtggtatcaacgcagagtacnnaatggacgnnacgcctatnntttttttttttttttttttttttttttttt

SEQ ID NO: 5600 - DNA, 84 bp, synthetic construct
  source 1..84: mol_type = other DNA
tttttttaagcagtggtatcaacgcagagtacnnaatggacgnnaacgacctnntttttttttttttttttttttttttttttt

SEQ ID NO: 5601 - DNA, 84 bp, synthetic construct
  source 1..84: mol_type = other DNA
tttttttaagcagtggtatcaacgcagagtacnnaatggacgnnatcaggctnntttttttttttttttttttttttttttttt

SEQ ID NO: 5602 - DNA, 84 bp, synthetic construct
  source 1..84: mol_type = other DNA
tttttttaagcagtggtatcaacgcagagtacnnaatggacgnncaagttcgnntttttttttttttttttttttttttttttt

SEQ ID NO: 5603 - DNA, 84 bp, synthetic construct
  source 1..84: mol_type = other DNA
tttttttaagcagtggtatcaacgcagagtacnnaatggacgnntagccaganntttttttttttttttttttttttttttttt

SEQ ID NO: 5604 - DNA, 84 bp, synthetic construct
  source 1..84: mol_type = other DNA
tttttttaagcagtggtatcaacgcagagtacnnaatggacgnncaatcacgnntttttttttttttttttttttttttttttt

SEQ ID NO: 5605 - DNA, 84 bp, synthetic construct
  source 1..84: mol_type = other DNA
tttttttaagcagtggtatcaacgcagagtacnnaatggacgnngcaacaagnntttttttttttttttttttttttttttttt

SEQ ID NO: 5606 - DNA, 84 bp, synthetic construct
  source 1..84: mol_type = other DNA
tttttttaagcagtggtatcaacgcagagtacnnaatggacgnncacgacaanntttttttttttttttttttttttttttttt

SEQ ID NO: 5607 - DNA, 84 bp, synthetic construct
  source 1..84: mol_type = other DNA
tttttttaagcagtggtatcaacgcagagtacnnaatggacgnntacggaganntttttttttttttttttttttttttttttt

SEQ ID NO: 5608 - DNA, 84 bp, synthetic construct
  source 1..84: mol_type = other DNA
tttttttaagcagtggtatcaacgcagagtacnnaatggacgnncgacaaganntttttttttttttttttttttttttttttt

SEQ ID NO: 5609 - DNA, 84 bp, synthetic construct
  source 1..84: mol_type = other DNA
tttttttaagcagtggtatcaacgcagagtacnnaatggacgnncgaagtganntttttttttttttttttttttttttttttt

SEQ ID NO: 5610 - DNA, 84 bp, synthetic construct
  source 1..84: mol_type = other DNA
tttttttaagcagtggtatcaacgcagagtacnnaatggacgnnagctggtanntttttttttttttttttttttttttttttt

SEQ ID NO: 5611 - DNA, 84 bp, synthetic construct
  source 1..84: mol_type = other DNA
tttttttaagcagtggtatcaacgcagagtacnnaatggacgnnaactaggcnntttttttttttttttttttttttttttttt

SEQ ID NO: 5612 - DNA, 84 bp, synthetic construct
  source 1..84: mol_type = other DNA
tttttttaagcagtggtatcaacgcagagtacnnaatggacgnncagcaagtnntttttttttttttttttttttttttttttt

SEQ ID NO: 5613 - DNA, 84 bp, synthetic construct
  source 1..84: mol_type = other DNA
tttttttaagcagtggtatcaacgcagagtacnnaatggacgnnacgaggtanntttttttttttttttttttttttttttttt

SEQ ID NO: 5614 - DNA, 84 bp, synthetic construct
  source 1..84: mol_type = other DNA
tttttttaagcagtggtatcaacgcagagtacnnaatggacgnncatcttccnntttttttttttttttttttttttttttttt

SEQ ID NO: 5615 - DNA, 84 bp, synthetic construct
  source 1..84: mol_type = other DNA
tttttttaagcagtggtatcaacgcagagtacnnaatggacgnncctgaatcnntttttttttttttttttttttttttttttt

SEQ ID NO: 5616 - DNA, 84 bp, synthetic construct
  source 1..84: mol_type = other DNA
tttttttaagcagtggtatcaacgcagagtacnnaatggacgnntgcagactnntttttttttttttttttttttttttttttt

SEQ ID NO: 5617 - DNA, 84 bp, synthetic construct
  source 1..84: mol_type = other DNA
tttttttaagcagtggtatcaacgcagagtacnnaatggacgnnagatgtggnntttttttttttttttttttttttttttttt

SEQ ID NO: 5618 - DNA, 84 bp, synthetic construct
  source 1..84: mol_type = other DNA
tttttttaagcagtggtatcaacgcagagtacnnaatggacgnnagttcgacnntttttttttttttttttttttttttttttt

SEQ ID NO: 5619 - DNA, 84 bp, synthetic construct
  source 1..84: mol_type = other DNA
tttttttaagcagtggtatcaacgcagagtacnnaatggacgnnacaacctcnntttttttttttttttttttttttttttttt

SEQ ID NO: 5620 - DNA, 84 bp, synthetic construct
  source 1..84: mol_type = other DNA
tttttttaagcagtggtatcaacgcagagtacnnaatggacgnncatggtagnntttttttttttttttttttttttttttttt

SEQ ID NO: 5621 - DNA, 84 bp, synthetic construct
  source 1..84: mol_type = other DNA
tttttttaagcagtggtatcaacgcagagtacnnaatggacgnncgtatctcnntttttttttttttttttttttttttttttt

SEQ ID NO: 5622 - DNA, 84 bp, synthetic construct
  source 1..84: mol_type = other DNA
tttttttaagcagtggtatcaacgcagagtacnnaatggacgnncctagttcnntttttttttttttttttttttttttttttt

SEQ ID NO: 5623 - DNA, 84 bp, synthetic construct
  source 1..84: mol_type = other DNA
tttttttaagcagtggtatcaacgcagagtacnnaatggacgnncaagagtcnntttttttttttttttttttttttttttttt

SEQ ID NO: 5624 - DNA, 84 bp, synthetic construct
  source 1..84: mol_type = other DNA
tttttttaagcagtggtatcaacgcagagtacnnatcggaagnnaatcggcanntttttttttttttttttttttttttttttt

SEQ ID NO: 5625 - DNA, 84 bp, synthetic construct
  source 1..84: mol_type = other DNA
tttttttaagcagtggtatcaacgcagagtacnnatcggaagnntacggcatnntttttttttttttttttttttttttttttt

SEQ ID NO: 5626 - DNA, 84 bp, synthetic construct
  source 1..84: mol_type = other DNA
tttttttaagcagtggtatcaacgcagagtacnnatcggaagnnttggatcgnntttttttttttttttttttttttttttttt

SEQ ID NO: 5627 - DNA, 84 bp, synthetic construct
  source 1..84: mol_type = other DNA
tttttttaagcagtggtatcaacgcagagtacnnatcggaagnntggaacganntttttttttttttttttttttttttttttt

SEQ ID NO: 5628 - DNA, 84 bp, synthetic construct
  source 1..84: mol_type = other DNA
tttttttaagcagtggtatcaacgcagagtacnnatcggaagnnggcaatcanntttttttttttttttttttttttttttttt

SEQ ID NO: 5629 - DNA, 84 bp, synthetic construct
  source 1..84: mol_type = other DNA
tttttttaagcagtggtatcaacgcagagtacnnatcggaagnngaatccganntttttttttttttttttttttttttttttt

SEQ ID NO: 5630 - DNA, 84 bp, synthetic construct
  source 1..84: mol_type = other DNA
tttttttaagcagtggtatcaacgcagagtacnnatcggaagnnttacggtgnntttttttttttttttttttttttttttttt

SEQ ID NO: 5631 - DNA, 84 bp, synthetic construct
  source 1..84: mol_type = other DNA
tttttttaagcagtggtatcaacgcagagtacnnatcggaagnncatatcggnntttttttttttttttttttttttttttttt

SEQ ID NO: 5632 - DNA, 84 bp, synthetic construct
  source 1..84: mol_type = other DNA
tttttttaagcagtggtatcaacgcagagtacnnatcggaagnncttcggtanntttttttttttttttttttttttttttttt

SEQ ID NO: 5633 - DNA, 84 bp, synthetic construct
  source 1..84: mol_type = other DNA
tttttttaagcagtggtatcaacgcagagtacnnatcggaagnntcctaacgnntttttttttttttttttttttttttttttt

SEQ ID NO: 5634 - DNA, 84 bp, synthetic construct
  source 1..84: mol_type = other DNA
tttttttaagcagtggtatcaacgcagagtacnnatcggaagnngtaagccanntttttttttttttttttttttttttttttt

SEQ ID NO: 5635 - DNA, 84 bp, synthetic construct
  source 1..84: mol_type = other DNA
tttttttaagcagtggtatcaacgcagagtacnnatcggaagnntaaggtggnntttttttttttttttttttttttttttttt

SEQ ID NO: 5636 - DNA, 84 bp, synthetic construct
  source 1..84: mol_type = other DNA
tttttttaagcagtggtatcaacgcagagtacnnatcggaagnnggtaagctnntttttttttttttttttttttttttttttt

SEQ ID NO: 5637 - DNA, 84 bp, synthetic construct
  source 1..84: mol_type = other DNA
tttttttaagcagtggtatcaacgcagagtacnnatcggaagnntgtgtcganntttttttttttttttttttttttttttttt

SEQ ID NO: 5638 - DNA, 84 bp, synthetic construct
  source 1..84: mol_type = other DNA
tttttttaagcagtggtatcaacgcagagtacnnatcggaagnngagcatganntttttttttttttttttttttttttttttt

SEQ ID NO: 5639 - DNA, 84 bp, synthetic construct
  source 1..84: mol_type = other DNA
tttttttaagcagtggtatcaacgcagagtacnnatcggaagnntcgaagtcnntttttttttttttttttttttttttttttt

SEQ ID NO: 5640 - DNA, 84 bp, synthetic construct
  source 1..84: mol_type = other DNA
tttttttaagcagtggtatcaacgcagagtacnnatcggaagnnggtgaacanntttttttttttttttttttttttttttttt

SEQ ID NO: 5641 - DNA, 84 bp, synthetic construct
  source 1..84: mol_type = other DNA
tttttttaagcagtggtatcaacgcagagtacnnatcggaagnnacatgcacnntttttttttttttttttttttttttttttt

SEQ ID NO: 5642 - DNA, 84 bp, synthetic construct
  source 1..84: mol_type = other DNA
tttttttaagcagtggtatcaacgcagagtacnnatcggaagnnccaacagtnntttttttttttttttttttttttttttttt

SEQ ID NO: 5643 - DNA, 84 bp, synthetic construct
  source 1..84: mol_type = other DNA
tttttttaagcagtggtatcaacgcagagtacnnatcggaagnnagaacagcnntttttttttttttttttttttttttttttt

SEQ ID NO: 5644 - DNA, 84 bp, synthetic construct
  source 1..84: mol_type = other DNA
tttttttaagcagtggtatcaacgcagagtacnnatcggaagnngaacacgtnntttttttttttttttttttttttttttttt

SEQ ID NO: 5645 - DNA, 84 bp, synthetic construct
  source 1..84: mol_type = other DNA
tttttttaagcagtggtatcaacgcagagtacnnatcggaagnnggtcttcanntttttttttttttttttttttttttttttt

SEQ ID NO: 5646 - DNA, 84 bp, synthetic construct
  source 1..84: mol_type = other DNA
tttttttaagcagtggtatcaacgcagagtacnnatcggaagnnaggttcagnntttttttttttttttttttttttttttttt

SEQ ID NO: 5647 - DNA, 84 bp, synthetic construct
  source 1..84: mol_type = other DNA
tttttttaagcagtggtatcaacgcagagtacnnatcggaagnnctagagcanntttttttttttttttttttttttttttttt

SEQ ID NO: 5648 - DNA, 84 bp, synthetic construct
  source 1..84: mol_type = other DNA
tttttttaagcagtggtatcaacgcagagtacnnatcggaagnncttctagcnntttttttttttttttttttttttttttttt

SEQ ID NO: 5649 - DNA, 84 bp, synthetic construct
  source 1..84: mol_type = other DNA
tttttttaagcagtggtatcaacgcagagtacnnatcggaagnngagtaacgnntttttttttttttttttttttttttttttt

SEQ ID NO: 5650 - DNA, 84 bp, synthetic construct
  source 1..84: mol_type = other DNA
tttttttaagcagtggtatcaacgcagagtacnnatcggaagnnctaagaggnntttttttttttttttttttttttttttttt

SEQ ID NO: 5651 - DNA, 84 bp, synthetic construct
  source 1..84: mol_type = other DNA
tttttttaagcagtggtatcaacgcagagtacnnatcggaagnnacgtgtagnntttttttttttttttttttttttttttttt

SEQ ID NO: 5652 - DNA, 84 bp, synthetic construct
  source 1..84: mol_type = other DNA
tttttttaagcagtggtatcaacgcagagtacnnatcggaagnnactacaggnntttttttttttttttttttttttttttttt

SEQ ID NO: 5653 - DNA, 84 bp, synthetic construct
  source 1..84: mol_type = other DNA
tttttttaagcagtggtatcaacgcagagtacnnatcggaagnntacaggtcnntttttttttttttttttttttttttttttt

SEQ ID NO: 5654 - DNA, 84 bp, synthetic construct
  source 1..84: mol_type = other DNA
tttttttaagcagtggtatcaacgcagagtacnnatcggaagnnctcacatgnntttttttttttttttttttttttttttttt

SEQ ID NO: 5655 - DNA, 84 bp, synthetic construct
  source 1..84: mol_type = other DNA
tttttttaagcagtggtatcaacgcagagtacnnatcggaagnnactaggagnntttttttttttttttttttttttttttttt

SEQ ID NO: 5656 - DNA, 84 bp, synthetic construct
  source 1..84: mol_type = other DNA
tttttttaagcagtggtatcaacgcagagtacnnatcggaagnnccatagganntttttttttttttttttttttttttttttt

SEQ ID NO: 5657 - DNA, 84 bp, synthetic construct
  source 1..84: mol_type = other DNA
tttttttaagcagtggtatcaacgcagagtacnnatcggaagnnggagaatcnntttttttttttttttttttttttttttttt

SEQ ID NO: 5658 - DNA, 84 bp, synthetic construct
  source 1..84: mol_type = other DNA
tttttttaagcagtggtatcaacgcagagtacnnatcggaagnngccaagaanntttttttttttttttttttttttttttttt

SEQ ID NO: 5659 - DNA, 84 bp, synthetic construct
  source 1..84: mol_type = other DNA
tttttttaagcagtggtatcaacgcagagtacnnatcggaagnnaaggcaagnntttttttttttttttttttttttttttttt

SEQ ID NO: 5660 - DNA, 84 bp, synthetic construct
  source 1..84: mol_type = other DNA
tttttttaagcagtggtatcaacgcagagtacnnatcggaagnnaatgtcgcnntttttttttttttttttttttttttttttt

SEQ ID NO: 5661 - DNA, 84 bp, synthetic construct
  source 1..84: mol_type = other DNA
tttttttaagcagtggtatcaacgcagagtacnnatcggaagnnatggaaccnntttttttttttttttttttttttttttttt

SEQ ID NO: 5662 - DNA, 84 bp, synthetic construct
  source 1..84: mol_type = other DNA
tttttttaagcagtggtatcaacgcagagtacnnatcggaagnnagaggcatnntttttttttttttttttttttttttttttt

SEQ ID NO: 5663 - DNA, 84 bp, synthetic construct
  source 1..84: mol_type = other DNA
tttttttaagcagtggtatcaacgcagagtacnnatcggaagnntgcatagcnntttttttttttttttttttttttttttttt

SEQ ID NO: 5664 - DNA, 84 bp, synthetic construct
  source 1..84: mol_type = other DNA
tttttttaagcagtggtatcaacgcagagtacnnatcggaagnnctaacgganntttttttttttttttttttttttttttttt

SEQ ID NO: 5665 - DNA, 84 bp, synthetic construct
  source 1..84: mol_type = other DNA
tttttttaagcagtggtatcaacgcagagtacnnatcggaagnntatcgaggnntttttttttttttttttttttttttttttt

SEQ ID NO: 5666 - DNA, 84 bp, synthetic construct
  source 1..84: mol_type = other DNA
tttttttaagcagtggtatcaacgcagagtacnnatcggaagnncatagcctnntttttttttttttttttttttttttttttt

SEQ ID NO: 5667 - DNA, 84 bp, synthetic construct
  source 1..84: mol_type = other DNA
tttttttaagcagtggtatcaacgcagagtacnnatcggaagnnatcgagacnntttttttttttttttttttttttttttttt

SEQ ID NO: 5668 - DNA, 84 bp, synthetic construct
  source 1..84: mol_type = other DNA
tttttttaagcagtggtatcaacgcagagtacnnatcggaagnnggaagagtnntttttttttttttttttttttttttttttt

SEQ ID NO: 5669 - DNA, 84 bp, synthetic construct
  source 1..84: mol_type = other DNA
tttttttaagcagtggtatcaacgcagagtacnnatcggaagnnccaagtagnntttttttttttttttttttttttttttttt

SEQ ID NO: 5670 - DNA, 84 bp, synthetic construct
  source 1..84: mol_type = other DNA
tttttttaagcagtggtatcaacgcagagtacnnatcggaagnnctgaacagnntttttttttttttttttttttttttttttt

SEQ ID NO: 5671 - DNA, 84 bp, synthetic construct
  source 1..84: mol_type = other DNA
tttttttaagcagtggtatcaacgcagagtacnnatcggaagnngtaggttcnntttttttttttttttttttttttttttttt

SEQ ID NO: 5672 - DNA, 84 bp, synthetic construct
  source 1..84: mol_type = other DNA
tttttttaagcagtggtatcaacgcagagtacnnatcggaagnngtatggacnntttttttttttttttttttttttttttttt

SEQ ID NO: 5673 - DNA, 84 bp, synthetic construct
  source 1..84: mol_type = other DNA
tttttttaagcagtggtatcaacgcagagtacnnatcggaagnntcgcaacanntttttttttttttttttttttttttttttt

SEQ ID NO: 5674 - DNA, 84 bp, synthetic construct
  source 1..84: mol_type = other DNA
tttttttaagcagtggtatcaacgcagagtacnnatcggaagnnccgctaatnntttttttttttttttttttttttttttttt

SEQ ID NO: 5675 - DNA, 84 bp, synthetic construct
  source 1..84: mol_type = other DNA
tttttttaagcagtggtatcaacgcagagtacnnatcggaagnngattcgcanntttttttttttttttttttttttttttttt

SEQ ID NO: 5676 - DNA, 84 bp, synthetic construct
  source 1..84: mol_type = other DNA
tttttttaagcagtggtatcaacgcagagtacnnatcggaagnncgatggaanntttttttttttttttttttttttttttttt

SEQ ID NO: 5677 - DNA, 84 bp, synthetic construct
  source 1..84: mol_type = other DNA
tttttttaagcagtggtatcaacgcagagtacnnatcggaagnnagcaagganntttttttttttttttttttttttttttttt

SEQ ID NO: 5678 - DNA, 84 bp, synthetic construct
  source 1..84: mol_type = other DNA
tttttttaagcagtggtatcaacgcagagtacnnatcggaagnncgtagcaanntttttttttttttttttttttttttttttt

SEQ ID NO: 5679 - DNA, 84 bp, synthetic construct
  source 1..84: mol_type = other DNA
tttttttaagcagtggtatcaacgcagagtacnnatcggaagnntggcagtanntttttttttttttttttttttttttttttt

SEQ ID NO: 5680 - DNA, 84 bp, synthetic construct
  source 1..84: mol_type = other DNA
tttttttaagcagtggtatcaacgcagagtacnnatcggaagnncggtagttnntttttttttttttttttttttttttttttt

SEQ ID NO: 5681 - DNA, 84 bp, synthetic construct
  source 1..84: mol_type = other DNA
tttttttaagcagtggtatcaacgcagagtacnnatcggaagnntgacttcgnntttttttttttttttttttttttttttttt

SEQ ID NO: 5682 - DNA, 84 bp, synthetic construct
  source 1..84: mol_type = other DNA
tttttttaagcagtggtatcaacgcagagtacnnatcggaagnngagtgcaanntttttttttttttttttttttttttttttt

SEQ ID NO: 5683 - DNA, 84 bp, synthetic construct
  source 1..84: mol_type = other DNA
tttttttaagcagtggtatcaacgcagagtacnnatcggaagnnacggtaacnntttttttttttttttttttttttttttttt

SEQ ID NO: 5684 - DNA, 84 bp, synthetic construct
  source 1..84: mol_type = other DNA
tttttttaagcagtggtatcaacgcagagtacnnatcggaagnnaagtggtgnntttttttttttttttttttttttttttttt

SEQ ID NO: 5685 - DNA, 84 bp, synthetic construct
  source 1..84: mol_type = other DNA
tttttttaagcagtggtatcaacgcagagtacnnatcggaagnnggagacaanntttttttttttttttttttttttttttttt

SEQ ID NO: 5686 - DNA, 84 bp, synthetic construct
  source 1..84: mol_type = other DNA
tttttttaagcagtggtatcaacgcagagtacnnatcggaagnntcaaggacnntttttttttttttttttttttttttttttt

SEQ ID NO: 5687 - DNA, 84 bp, synthetic construct
  source 1..84: mol_type = other DNA
tttttttaagcagtggtatcaacgcagagtacnnatcggaagnnaagagagcnntttttttttttttttttttttttttttttt

SEQ ID NO: 5688 - DNA, 84 bp, synthetic construct
  source 1..84: mol_type = other DNA
tttttttaagcagtggtatcaacgcagagtacnnatcggaagnncgagagatnntttttttttttttttttttttttttttttt

SEQ ID NO: 5689 - DNA, 84 bp, synthetic construct
  source 1..84: mol_type = other DNA
tttttttaagcagtggtatcaacgcagagtacnnatcggaagnnacagatggnntttttttttttttttttttttttttttttt

SEQ ID NO: 5690 - DNA, 84 bp, synthetic construct
  source 1..84: mol_type = other DNA
tttttttaagcagtggtatcaacgcagagtacnnatcggaagnnaggagtcanntttttttttttttttttttttttttttttt

SEQ ID NO: 5691 - DNA, 84 bp, synthetic construct
  source 1..84: mol_type = other DNA
tttttttaagcagtggtatcaacgcagagtacnnatcggaagnncgtgttacnntttttttttttttttttttttttttttttt

SEQ ID NO: 5692 - DNA, 84 bp, synthetic construct
  source 1..84: mol_type = other DNA
tttttttaagcagtggtatcaacgcagagtacnnatcggaagnntagtgtgcnntttttttttttttttttttttttttttttt

SEQ ID NO: 5693 - DNA, 84 bp, synthetic construct
  source 1..84: mol_type = other DNA
tttttttaagcagtggtatcaacgcagagtacnnatcggaagnnctcatgacnntttttttttttttttttttttttttttttt

SEQ ID NO: 5694 - DNA, 84 bp, synthetic construct
  source 1..84: mol_type = other DNA
tttttttaagcagtggtatcaacgcagagtacnnatcggaagnngtatccagnntttttttttttttttttttttttttttttt

SEQ ID NO: 5695 - DNA, 84 bp, synthetic construct
  source 1..84: mol_type = other DNA
tttttttaagcagtggtatcaacgcagagtacnnatcggaagnnacgcctatnntttttttttttttttttttttttttttttt

SEQ ID NO: 5696 - DNA, 84 bp, synthetic construct
  source 1..84: mol_type = other DNA
tttttttaagcagtggtatcaacgcagagtacnnatcggaagnnaacgacctnntttttttttttttttttttttttttttttt

SEQ ID NO: 5697 - DNA, 84 bp, synthetic construct
  source 1..84: mol_type = other DNA
tttttttaagcagtggtatcaacgcagagtacnnatcggaagnnatcaggctnntttttttttttttttttttttttttttttt

SEQ ID NO: 5698 - DNA, 84 bp, synthetic construct
  source 1..84: mol_type = other DNA
tttttttaagcagtggtatcaacgcagagtacnnatcggaagnncaagttcgnntttttttttttttttttttttttttttttt

SEQ ID NO: 5699 - DNA, 84 bp, synthetic construct
  source 1..84: mol_type = other DNA
tttttttaagcagtggtatcaacgcagagtacnnatcggaagnntagccaganntttttttttttttttttttttttttttttt

SEQ ID NO: 5700 - DNA, 84 bp, synthetic construct
  source 1..84: mol_type = other DNA
tttttttaagcagtggtatcaacgcagagtacnnatcggaagnncaatcacgnntttttttttttttttttttttttttttttt

SEQ ID NO: 5701 - DNA, 84 bp, synthetic construct
  source 1..84: mol_type = other DNA
tttttttaagcagtggtatcaacgcagagtacnnatcggaagnngcaacaagnntttttttttttttttttttttttttttttt

SEQ ID NO: 5702 - DNA, 84 bp, synthetic construct
  source 1..84: mol_type = other DNA
tttttttaagcagtggtatcaacgcagagtacnnatcggaagnncacgacaanntttttttttttttttttttttttttttttt

SEQ ID NO: 5703 - DNA, 84 bp, synthetic construct
  source 1..84: mol_type = other DNA
tttttttaagcagtggtatcaacgcagagtacnnatcggaagnntacggaganntttttttttttttttttttttttttttttt

SEQ ID NO: 5704 - DNA, 84 bp, synthetic construct
  source 1..84: mol_type = other DNA
tttttttaagcagtggtatcaacgcagagtacnnatcggaagnncgacaaganntttttttttttttttttttttttttttttt

SEQ ID NO: 5705 - DNA, 84 bp, synthetic construct
  source 1..84: mol_type = other DNA
tttttttaagcagtggtatcaacgcagagtacnnatcggaagnncgaagtganntttttttttttttttttttttttttttttt

SEQ ID NO: 5706 - DNA, 84 bp, synthetic construct
  source 1..84: mol_type = other DNA
tttttttaagcagtggtatcaacgcagagtacnnatcggaagnnagctggtanntttttttttttttttttttttttttttttt

SEQ ID NO: 5707 - DNA, 84 bp, synthetic construct
  source 1..84: mol_type = other DNA
tttttttaagcagtggtatcaacgcagagtacnnatcggaagnnaactaggcnntttttttttttttttttttttttttttttt

SEQ ID NO: 5708 - DNA, 84 bp, synthetic construct
  source 1..84: mol_type = other DNA
tttttttaagcagtggtatcaacgcagagtacnnatcggaagnncagcaagtnntttttttttttttttttttttttttttttt

SEQ ID NO: 5709 - DNA, 84 bp, synthetic construct
  source 1..84: mol_type = other DNA
tttttttaagcagtggtatcaacgcagagtacnnatcggaagnnacgaggtanntttttttttttttttttttttttttttttt

SEQ ID NO: 5710 - DNA, 84 bp, synthetic construct
  source 1..84: mol_type = other DNA
tttttttaagcagtggtatcaacgcagagtacnnatcggaagnncatcttccnntttttttttttttttttttttttttttttt

SEQ ID NO: 5711 - DNA, 84 bp, synthetic construct
  source 1..84: mol_type = other DNA
tttttttaagcagtggtatcaacgcagagtacnnatcggaagnncctgaatcnntttttttttttttttttttttttttttttt

SEQ ID NO: 5712 - DNA, 84 bp, synthetic construct
  source 1..84: mol_type = other DNA
tttttttaagcagtggtatcaacgcagagtacnnatcggaagnntgcagactnntttttttttttttttttttttttttttttt

SEQ ID NO: 5713 - DNA, 84 bp, synthetic construct
  source 1..84: mol_type = other DNA
tttttttaagcagtggtatcaacgcagagtacnnatcggaagnnagatgtggnntttttttttttttttttttttttttttttt

SEQ ID NO: 5714 - DNA, 84 bp, synthetic construct
  source 1..84: mol_type = other DNA
tttttttaagcagtggtatcaacgcagagtacnnatcggaagnnagttcgacnntttttttttttttttttttttttttttttt

SEQ ID NO: 5715 - DNA, 84 bp, synthetic construct
  source 1..84: mol_type = other DNA
tttttttaagcagtggtatcaacgcagagtacnnatcggaagnnacaacctcnntttttttttttttttttttttttttttttt

SEQ ID NO: 5716 - DNA, 84 bp, synthetic construct
  source 1..84: mol_type = other DNA
tttttttaagcagtggtatcaacgcagagtacnnatcggaagnncatggtagnntttttttttttttttttttttttttttttt

SEQ ID NO: 5717 - DNA, 84 bp, synthetic construct
  source 1..84: mol_type = other DNA
tttttttaagcagtggtatcaacgcagagtacnnatcggaagnncgtatctcnntttttttttttttttttttttttttttttt

SEQ ID NO: 5718 - DNA, 84 bp, synthetic construct
  source 1..84: mol_type = other DNA
tttttttaagcagtggtatcaacgcagagtacnnatcggaagnncctagttcnntttttttttttttttttttttttttttttt

SEQ ID NO: 5719 - DNA, 84 bp, synthetic construct
  source 1..84: mol_type = other DNA
tttttttaagcagtggtatcaacgcagagtacnnatcggaagnncaagagtcnntttttttttttttttttttttttttttttt

SEQ ID NO: 5720 - DNA, 84 bp, synthetic construct
  source 1..84: mol_type = other DNA
tttttttaagcagtggtatcaacgcagagtacnnaagacggannaatcggcanntttttttttttttttttttttttttttttt

SEQ ID NO: 5721 - DNA, 84 bp, synthetic construct
  source 1..84: mol_type = other DNA
tttttttaagcagtggtatcaacgcagagtacnnaagacgganntacggcatnntttttttttttttttttttttttttttttt

SEQ ID NO: 5722 - DNA, 84 bp, synthetic construct
  source 1..84: mol_type = other DNA
tttttttaagcagtggtatcaacgcagagtacnnaagacggannttggatcgnntttttttttttttttttttttttttttttt

SEQ ID NO: 5723 - DNA, 84 bp, synthetic construct
  source 1..84: mol_type = other DNA
tttttttaagcagtggtatcaacgcagagtacnnaagacgganntggaacganntttttttttttttttttttttttttttttt

SEQ ID NO: 5724 - DNA, 84 bp, synthetic construct
  source 1..84: mol_type = other DNA
tttttttaagcagtggtatcaacgcagagtacnnaagacggannggcaatcanntttttttttttttttttttttttttttttt

SEQ ID NO: 5725 - DNA, 84 bp, synthetic construct
  source 1..84: mol_type = other DNA
tttttttaagcagtggtatcaacgcagagtacnnaagacgganngaatccganntttttttttttttttttttttttttttttt

SEQ ID NO: 5726 - DNA, 84 bp, synthetic construct
  source 1..84: mol_type = other DNA
tttttttaagcagtggtatcaacgcagagtacnnaagacggannttacggtgnntttttttttttttttttttttttttttttt

SEQ ID NO: 5727 - DNA, 84 bp, synthetic construct
  source 1..84: mol_type = other DNA
tttttttaagcagtggtatcaacgcagagtacnnaagacgganncatatcggnntttttttttttttttttttttttttttttt

SEQ ID NO: 5728 - DNA, 84 bp, synthetic construct
  source 1..84: mol_type = other DNA
tttttttaagcagtggtatcaacgcagagtacnnaagacgganncttcggtanntttttttttttttttttttttttttttttt

SEQ ID NO: 5729 - DNA, 84 bp, synthetic construct
  source 1..84: mol_type = other DNA
tttttttaagcagtggtatcaacgcagagtacnnaagacgganntcctaacgnntttttttttttttttttttttttttttttt

SEQ ID NO: 5730 - DNA, 84 bp, synthetic construct
  source 1..84: mol_type = other DNA
tttttttaagcagtggtatcaacgcagagtacnnaagacgganngtaagccanntttttttttttttttttttttttttttttt

SEQ ID NO: 5731 - DNA, 84 bp, synthetic construct
  source 1..84: mol_type = other DNA
tttttttaagcagtggtatcaacgcagagtacnnaagacgganntaaggtggnntttttttttttttttttttttttttttttt

SEQ ID NO: 5732 - DNA, 84 bp, synthetic construct
  source 1..84: mol_type = other DNA
tttttttaagcagtggtatcaacgcagagtacnnaagacggannggtaagctnntttttttttttttttttttttttttttttt

SEQ ID NO: 5733 - DNA, 84 bp, synthetic construct
  source 1..84: mol_type = other DNA
tttttttaagcagtggtatcaacgcagagtacnnaagacgganntgtgtcganntttttttttttttttttttttttttttttt

SEQ ID NO: 5734 - DNA, 84 bp, synthetic construct
  source 1..84: mol_type = other DNA
tttttttaagcagtggtatcaacgcagagtacnnaagacgganngagcatganntttttttttttttttttttttttttttttt

SEQ ID NO: 5735 - DNA, 84 bp, synthetic construct
  source 1..84: mol_type = other DNA
tttttttaagcagtggtatcaacgcagagtacnnaagacgganntcgaagtcnntttttttttttttttttttttttttttttt

SEQ ID NO: 5736 - DNA, 84 bp, synthetic construct
  source 1..84: mol_type = other DNA
tttttttaagcagtggtatcaacgcagagtacnnaagacggannggtgaacanntttttttttttttttttttttttttttttt

SEQ ID NO: 5737 - DNA, 84 bp, synthetic construct
  source 1..84: mol_type = other DNA
tttttttaagcagtggtatcaacgcagagtacnnaagacggannacatgcacnntttttttttttttttttttttttttttttt

SEQ ID NO: 5738 - DNA, 84 bp, synthetic construct
  source 1..84: mol_type = other DNA
tttttttaagcagtggtatcaacgcagagtacnnaagacggannccaacagtnntttttttttttttttttttttttttttttt

SEQ ID NO: 5739 - DNA, 84 bp, synthetic construct
  source 1..84: mol_type = other DNA
tttttttaagcagtggtatcaacgcagagtacnnaagacggannagaacagcnntttttttttttttttttttttttttttttt

SEQ ID NO: 5740 - DNA, 84 bp, synthetic construct
  source 1..84: mol_type = other DNA
tttttttaagcagtggtatcaacgcagagtacnnaagacgganngaacacgtnntttttttttttttttttttttttttttttt

SEQ ID NO: 5741 - DNA, 84 bp, synthetic construct
  source 1..84: mol_type = other DNA
tttttttaagcagtggtatcaacgcagagtacnnaagacggannggtcttcanntttttttttttttttttttttttttttttt

SEQ ID NO: 5742 - DNA, 84 bp, synthetic construct
  source 1..84: mol_type = other DNA
tttttttaagcagtggtatcaacgcagagtacnnaagacggannaggttcagnntttttttttttttttttttttttttttttt

SEQ ID NO: 5743 - DNA, 84 bp, synthetic construct
  source 1..84: mol_type = other DNA
tttttttaagcagtggtatcaacgcagagtacnnaagacggannctagagcanntttttttttttttttttttttttttttttt

SEQ ID NO: 5744 - DNA, 84 bp, synthetic construct
  source 1..84: mol_type = other DNA
tttttttaagcagtggtatcaacgcagagtacnnaagacgganncttctagcnntttttttttttttttttttttttttttttt

SEQ ID NO: 5745 - DNA, 84 bp, synthetic construct
  source 1..84: mol_type = other DNA
tttttttaagcagtggtatcaacgcagagtacnnaagacgganngagtaacgnntttttttttttttttttttttttttttttt

SEQ ID NO: 5746 - DNA, 84 bp, synthetic construct
  source 1..84: mol_type = other DNA
tttttttaagcagtggtatcaacgcagagtacnnaagacggannctaagaggnntttttttttttttttttttttttttttttt

SEQ ID NO: 5747 - DNA, 84 bp, synthetic construct
  source 1..84: mol_type = other DNA
tttttttaagcagtggtatcaacgcagagtacnnaagacggannacgtgtagnntttttttttttttttttttttttttttttt

SEQ ID NO: 5748 - DNA, 84 bp, synthetic construct
  source 1..84: mol_type = other DNA
tttttttaagcagtggtatcaacgcagagtacnnaagacggannactacaggnntttttttttttttttttttttttttttttt

SEQ ID NO: 5749 - DNA, 84 bp, synthetic construct
  source 1..84: mol_type = other DNA
tttttttaagcagtggtatcaacgcagagtacnnaagacgganntacaggtcnntttttttttttttttttttttttttttttt

SEQ ID NO: 5750 - DNA, 84 bp, synthetic construct
  source 1..84: mol_type = other DNA
tttttttaagcagtggtatcaacgcagagtacnnaagacggannctcacatgnntttttttttttttttttttttttttttttt

SEQ ID NO: 5751 - DNA, 84 bp, synthetic construct
  source 1..84: mol_type = other DNA
tttttttaagcagtggtatcaacgcagagtacnnaagacggannactaggagnntttttttttttttttttttttttttttttt

SEQ ID NO: 5752 - DNA, 84 bp, synthetic construct
  source 1..84: mol_type = other DNA
tttttttaagcagtggtatcaacgcagagtacnnaagacggannccatagganntttttttttttttttttttttttttttttt

SEQ ID NO: 5753 - DNA, 84 bp, synthetic construct
  source 1..84: mol_type = other DNA
tttttttaagcagtggtatcaacgcagagtacnnaagacggannggagaatcnntttttttttttttttttttttttttttttt

SEQ ID NO: 5754 - DNA, 84 bp, synthetic construct
  source 1..84: mol_type = other DNA
tttttttaagcagtggtatcaacgcagagtacnnaagacgganngccaagaanntttttttttttttttttttttttttttttt

SEQ ID NO: 5755 - DNA, 84 bp, synthetic construct
  source 1..84: mol_type = other DNA
tttttttaagcagtggtatcaacgcagagtacnnaagacggannaaggcaagnntttttttttttttttttttttttttttttt

SEQ ID NO: 5756 - DNA, 84 bp, synthetic construct
  source 1..84: mol_type = other DNA
tttttttaagcagtggtatcaacgcagagtacnnaagacggannaatgtcgcnntttttttttttttttttttttttttttttt

SEQ ID NO: 5757 - DNA, 84 bp, synthetic construct
  source 1..84: mol_type = other DNA
tttttttaagcagtggtatcaacgcagagtacnnaagacggannatggaaccnntttttttttttttttttttttttttttttt

SEQ ID NO: 5758 - DNA, 84 bp, synthetic construct
  source 1..84: mol_type = other DNA
tttttttaagcagtggtatcaacgcagagtacnnaagacggannagaggcatnntttttttttttttttttttttttttttttt

SEQ ID NO: 5759 - DNA, 84 bp, synthetic construct
  source 1..84: mol_type = other DNA
tttttttaagcagtggtatcaacgcagagtacnnaagacgganntgcatagcnntttttttttttttttttttttttttttttt

SEQ ID NO: 5760 - DNA, 84 bp, synthetic construct
  source 1..84: mol_type = other DNA
tttttttaagcagtggtatcaacgcagagtacnnaagacggannctaacgganntttttttttttttttttttttttttttttt

SEQ ID NO: 5761 - DNA, 84 bp, synthetic construct
  source 1..84: mol_type = other DNA
tttttttaagcagtggtatcaacgcagagtacnnaagacgganntatcgaggnntttttttttttttttttttttttttttttt

SEQ ID NO: 5762 - DNA, 84 bp, synthetic construct
  source 1..84: mol_type = other DNA
tttttttaagcagtggtatcaacgcagagtacnnaagacgganncatagcctnntttttttttttttttttttttttttttttt

SEQ ID NO: 5763 - DNA, 84 bp, synthetic construct
  source 1..84: mol_type = other DNA
tttttttaagcagtggtatcaacgcagagtacnnaagacggannatcgagacnntttttttttttttttttttttttttttttt

SEQ ID NO: 5764 - DNA, 84 bp, synthetic construct
  source 1..84: mol_type = other DNA
tttttttaagcagtggtatcaacgcagagtacnnaagacggannggaagagtnntttttttttttttttttttttttttttttt

SEQ ID NO: 5765 - DNA, 84 bp, synthetic construct
  source 1..84: mol_type = other DNA
tttttttaagcagtggtatcaacgcagagtacnnaagacggannccaagtagnntttttttttttttttttttttttttttttt

SEQ ID NO: 5766 - DNA, 84 bp, synthetic construct
  source 1..84: mol_type = other DNA
tttttttaagcagtggtatcaacgcagagtacnnaagacggannctgaacagnntttttttttttttttttttttttttttttt

SEQ ID NO: 5767 - DNA, 84 bp, synthetic construct
  source 1..84: mol_type = other DNA
tttttttaagcagtggtatcaacgcagagtacnnaagacgganngtaggttcnntttttttttttttttttttttttttttttt

SEQ ID NO: 5768 - DNA, 84 bp, synthetic construct
  source 1..84: mol_type = other DNA
tttttttaagcagtggtatcaacgcagagtacnnaagacgganngtatggacnntttttttttttttttttttttttttttttt

SEQ ID NO: 5769 - DNA, 84 bp, synthetic construct
  source 1..84: mol_type = other DNA
tttttttaagcagtggtatcaacgcagagtacnnaagacgganntcgcaacanntttttttttttttttttttttttttttttt

SEQ ID NO: 5770 - DNA, 84 bp, synthetic construct
  source 1..84: mol_type = other DNA
tttttttaagcagtggtatcaacgcagagtacnnaagacggannccgctaatnntttttttttttttttttttttttttttttt

SEQ ID NO: 5771 - DNA, 84 bp, synthetic construct
  source 1..84: mol_type = other DNA
tttttttaagcagtggtatcaacgcagagtacnnaagacgganngattcgcanntttttttttttttttttttttttttttttt

SEQ ID NO: 5772 - DNA, 84 bp, synthetic construct
  source 1..84: mol_type = other DNA
tttttttaagcagtggtatcaacgcagagtacnnaagacgganncgatggaanntttttttttttttttttttttttttttttt

SEQ ID NO: 5773 - DNA, 84 bp, synthetic construct
  source 1..84: mol_type = other DNA
tttttttaagcagtggtatcaacgcagagtacnnaagacggannagcaagganntttttttttttttttttttttttttttttt

SEQ ID NO: 5774 - DNA, 84 bp, synthetic construct
  source 1..84: mol_type = other DNA
tttttttaagcagtggtatcaacgcagagtacnnaagacgganncgtagcaanntttttttttttttttttttttttttttttt

SEQ ID NO: 5775 - DNA, 84 bp, synthetic construct
  source 1..84: mol_type = other DNA
tttttttaagcagtggtatcaacgcagagtacnnaagacgganntggcagtanntttttttttttttttttttttttttttttt

SEQ ID NO: 5776 - DNA, 84 bp, synthetic construct
  source 1..84: mol_type = other DNA
tttttttaagcagtggtatcaacgcagagtacnnaagacgganncggtagttnntttttttttttttttttttttttttttttt

SEQ ID NO: 5777 - DNA, 84 bp, synthetic construct
  source 1..84: mol_type = other DNA
tttttttaagcagtggtatcaacgcagagtacnnaagacgganntgacttcgnntttttttttttttttttttttttttttttt

SEQ ID NO: 5778 - DNA, 84 bp, synthetic construct
  source 1..84: mol_type = other DNA
tttttttaagcagtggtatcaacgcagagtacnnaagacgganngagtgcaanntttttttttttttttttttttttttttttt

SEQ ID NO: 5779 - DNA, 84 bp, synthetic construct
  source 1..84: mol_type = other DNA
tttttttaagcagtggtatcaacgcagagtacnnaagacggannacggtaacnntttttttttttttttttttttttttttttt

SEQ ID NO: 5780 - DNA, 84 bp, synthetic construct
  source 1..84: mol_type = other DNA
tttttttaagcagtggtatcaacgcagagtacnnaagacggannaagtggtgnntttttttttttttttttttttttttttttt

SEQ ID NO: 5781 - DNA, 84 bp, synthetic construct
  source 1..84: mol_type = other DNA
tttttttaagcagtggtatcaacgcagagtacnnaagacggannggagacaanntttttttttttttttttttttttttttttt

SEQ ID NO: 5782 - DNA, 84 bp, synthetic construct
  source 1..84: mol_type = other DNA
tttttttaagcagtggtatcaacgcagagtacnnaagacgganntcaaggacnntttttttttttttttttttttttttttttt

SEQ ID NO: 5783 - DNA, 84 bp, synthetic construct
  source 1..84: mol_type = other DNA
tttttttaagcagtggtatcaacgcagagtacnnaagacggannaagagagcnntttttttttttttttttttttttttttttt

SEQ ID NO: 5784 - DNA, 84 bp, synthetic construct
  source 1..84: mol_type = other DNA
tttttttaagcagtggtatcaacgcagagtacnnaagacgganncgagagatnntttttttttttttttttttttttttttttt

SEQ ID NO: 5785 - DNA, 84 bp, synthetic construct
  source 1..84: mol_type = other DNA
tttttttaagcagtggtatcaacgcagagtacnnaagacggannacagatggnntttttttttttttttttttttttttttttt

SEQ ID NO: 5786 - DNA, 84 bp, synthetic construct
  source 1..84: mol_type = other DNA
tttttttaagcagtggtatcaacgcagagtacnnaagacggannaggagtcanntttttttttttttttttttttttttttttt

SEQ ID NO: 5787 - DNA, 84 bp, synthetic construct
  source 1..84: mol_type = other DNA
tttttttaagcagtggtatcaacgcagagtacnnaagacgganncgtgttacnntttttttttttttttttttttttttttttt

SEQ ID NO: 5788 - DNA, 84 bp, synthetic construct
  source 1..84: mol_type = other DNA
tttttttaagcagtggtatcaacgcagagtacnnaagacgganntagtgtgcnntttttttttttttttttttttttttttttt

SEQ ID NO: 5789 - DNA, 84 bp, synthetic construct
  source 1..84: mol_type = other DNA
tttttttaagcagtggtatcaacgcagagtacnnaagacggannctcatgacnntttttttttttttttttttttttttttttt

SEQ ID NO: 5790 - DNA, 84 bp, synthetic construct
  source 1..84: mol_type = other DNA
tttttttaagcagtggtatcaacgcagagtacnnaagacgganngtatccagnntttttttttttttttttttttttttttttt

SEQ ID NO: 5791 - DNA, 84 bp, synthetic construct
  source 1..84: mol_type = other DNA
tttttttaagcagtggtatcaacgcagagtacnnaagacggannacgcctatnntttttttttttttttttttttttttttttt

SEQ ID NO: 5792 - DNA, 84 bp, synthetic construct
  source 1..84: mol_type = other DNA
tttttttaagcagtggtatcaacgcagagtacnnaagacggannaacgacctnntttttttttttttttttttttttttttttt

SEQ ID NO: 5793 - DNA, 84 bp, synthetic construct
  source 1..84: mol_type = other DNA
tttttttaagcagtggtatcaacgcagagtacnnaagacggannatcaggctnntttttttttttttttttttttttttttttt

SEQ ID NO: 5794 - DNA, 84 bp, synthetic construct
  source 1..84: mol_type = other DNA
tttttttaagcagtggtatcaacgcagagtacnnaagacgganncaagttcgnntttttttttttttttttttttttttttttt

SEQ ID NO: 5795 - DNA, 84 bp, synthetic construct
  source 1..84: mol_type = other DNA
tttttttaagcagtggtatcaacgcagagtacnnaagacgganntagccaganntttttttttttttttttttttttttttttt

SEQ ID NO: 5796 - DNA, 84 bp, synthetic construct
  source 1..84: mol_type = other DNA
tttttttaagcagtggtatcaacgcagagtacnnaagacgganncaatcacgnntttttttttttttttttttttttttttttt

SEQ ID NO: 5797 - DNA, 84 bp, synthetic construct
  source 1..84: mol_type = other DNA
tttttttaagcagtggtatcaacgcagagtacnnaagacgganngcaacaagnntttttttttttttttttttttttttttttt

SEQ ID NO: 5798 - DNA, 84 bp, synthetic construct
  source 1..84: mol_type = other DNA
tttttttaagcagtggtatcaacgcagagtacnnaagacgganncacgacaanntttttttttttttttttttttttttttttt

SEQ ID NO: 5799 - DNA, 84 bp, synthetic construct
  source 1..84: mol_type = other DNA
tttttttaagcagtggtatcaacgcagagtacnnaagacgganntacggaganntttttttttttttttttttttttttttttt

SEQ ID NO: 5800 - DNA, 84 bp, synthetic construct
  source 1..84: mol_type = other DNA
tttttttaagcagtggtatcaacgcagagtacnnaagacgganncgacaaganntttttttttttttttttttttttttttttt

SEQ ID NO: 5801 - DNA, 84 bp, synthetic construct
  source 1..84: mol_type = other DNA
tttttttaagcagtggtatcaacgcagagtacnnaagacgganncgaagtganntttttttttttttttttttttttttttttt

SEQ ID NO: 5802 - DNA, 84 bp, synthetic construct
  source 1..84: mol_type = other DNA
tttttttaagcagtggtatcaacgcagagtacnnaagacggannagctggtanntttttttttttttttttttttttttttttt

SEQ ID NO: 5803 - DNA, 84 bp, synthetic construct
  source 1..84: mol_type = other DNA
tttttttaagcagtggtatcaacgcagagtacnnaagacggannaactaggcnntttttttttttttttttttttttttttttt

SEQ ID NO: 5804 - DNA, 84 bp, synthetic construct
  source 1..84: mol_type = other DNA
tttttttaagcagtggtatcaacgcagagtacnnaagacgganncagcaagtnntttttttttttttttttttttttttttttt

SEQ ID NO: 5805 - DNA, 84 bp, synthetic construct
  source 1..84: mol_type = other DNA
tttttttaagcagtggtatcaacgcagagtacnnaagacggannacgaggtanntttttttttttttttttttttttttttttt

SEQ ID NO: 5806 - DNA, 84 bp, synthetic construct
  source 1..84: mol_type = other DNA
tttttttaagcagtggtatcaacgcagagtacnnaagacgganncatcttccnntttttttttttttttttttttttttttttt

SEQ ID NO: 5807 - DNA, 84 bp, synthetic construct
  source 1..84: mol_type = other DNA
tttttttaagcagtggtatcaacgcagagtacnnaagacgganncctgaatcnntttttttttttttttttttttttttttttt

SEQ ID NO: 5808 - DNA, 84 bp, synthetic construct
  source 1..84: mol_type = other DNA
tttttttaagcagtggtatcaacgcagagtacnnaagacgganntgcagactnntttttttttttttttttttttttttttttt

SEQ ID NO: 5809 - DNA, 84 bp, synthetic construct
  source 1..84: mol_type = other DNA
tttttttaagcagtggtatcaacgcagagtacnnaagacggannagatgtggnntttttttttttttttttttttttttttttt

SEQ ID NO: 5810 - DNA, 84 bp, synthetic construct
  source 1..84: mol_type = other DNA
tttttttaagcagtggtatcaacgcagagtacnnaagacggannagttcgacnntttttttttttttttttttttttttttttt

SEQ ID NO: 5811 - DNA, 84 bp, synthetic construct
  source 1..84: mol_type = other DNA
tttttttaagcagtggtatcaacgcagagtacnnaagacggannacaacctcnntttttttttttttttttttttttttttttt

SEQ ID NO: 5812 - DNA, 84 bp, synthetic construct
  source 1..84: mol_type = other DNA
tttttttaagcagtggtatcaacgcagagtacnnaagacgganncatggtagnntttttttttttttttttttttttttttttt

SEQ ID NO: 5813 - DNA, 84 bp, synthetic construct
  source 1..84: mol_type = other DNA
tttttttaagcagtggtatcaacgcagagtacnnaagacgganncgtatctcnntttttttttttttttttttttttttttttt

SEQ ID NO: 5814 - DNA, 84 bp, synthetic construct
  source 1..84: mol_type = other DNA
tttttttaagcagtggtatcaacgcagagtacnnaagacgganncctagttcnntttttttttttttttttttttttttttttt

SEQ ID NO: 5815 - DNA, 84 bp, synthetic construct
  source 1..84: mol_type = other DNA
tttttttaagcagtggtatcaacgcagagtacnnaagacgganncaagagtcnntttttttttttttttttttttttttttttt

SEQ ID NO: 5816 - DNA, 84 bp, synthetic construct
  source 1..84: mol_type = other DNA
tttttttaagcagtggtatcaacgcagagtacnnactaaccgnnaatcggcanntttttttttttttttttttttttttttttt

SEQ ID NO: 5817 - DNA, 84 bp, synthetic construct
  source 1..84: mol_type = other DNA
tttttttaagcagtggtatcaacgcagagtacnnactaaccgnntacggcatnntttttttttttttttttttttttttttttt

SEQ ID NO: 5818 - DNA, 84 bp, synthetic construct
  source 1..84: mol_type = other DNA
tttttttaagcagtggtatcaacgcagagtacnnactaaccgnnttggatcgnntttttttttttttttttttttttttttttt

SEQ ID NO: 5819 - DNA, 84 bp, synthetic construct
  source 1..84: mol_type = other DNA
tttttttaagcagtggtatcaacgcagagtacnnactaaccgnntggaacganntttttttttttttttttttttttttttttt

SEQ ID NO: 5820 - DNA, 84 bp, synthetic construct
  source 1..84: mol_type = other DNA
tttttttaagcagtggtatcaacgcagagtacnnactaaccgnnggcaatcanntttttttttttttttttttttttttttttt

SEQ ID NO: 5821 - DNA, 84 bp, synthetic construct
  source 1..84: mol_type = other DNA
tttttttaagcagtggtatcaacgcagagtacnnactaaccgnngaatccganntttttttttttttttttttttttttttttt

SEQ ID NO: 5822 - DNA, 84 bp, synthetic construct
  source 1..84: mol_type = other DNA
tttttttaagcagtggtatcaacgcagagtacnnactaaccgnnttacggtgnntttttttttttttttttttttttttttttt

SEQ ID NO: 5823 - DNA, 84 bp, synthetic construct
  source 1..84: mol_type = other DNA
tttttttaagcagtggtatcaacgcagagtacnnactaaccgnncatatcggnntttttttttttttttttttttttttttttt

SEQ ID NO: 5824 - DNA, 84 bp, synthetic construct
  source 1..84: mol_type = other DNA
tttttttaagcagtggtatcaacgcagagtacnnactaaccgnncttcggtanntttttttttttttttttttttttttttttt

SEQ ID NO: 5825 - DNA, 84 bp, synthetic construct
  source 1..84: mol_type = other DNA
tttttttaagcagtggtatcaacgcagagtacnnactaaccgnntcctaacgnntttttttttttttttttttttttttttttt

SEQ ID NO: 5826 - DNA, 84 bp, synthetic construct
  source 1..84: mol_type = other DNA
tttttttaagcagtggtatcaacgcagagtacnnactaaccgnngtaagccanntttttttttttttttttttttttttttttt

SEQ ID NO: 5827 - DNA, 84 bp, synthetic construct
  source 1..84: mol_type = other DNA
tttttttaagcagtggtatcaacgcagagtacnnactaaccgnntaaggtggnntttttttttttttttttttttttttttttt

SEQ ID NO: 5828 - DNA, 84 bp, synthetic construct
  source 1..84: mol_type = other DNA
tttttttaagcagtggtatcaacgcagagtacnnactaaccgnnggtaagctnntttttttttttttttttttttttttttttt

SEQ ID NO: 5829 - DNA, 84 bp, synthetic construct
  source 1..84: mol_type = other DNA
tttttttaagcagtggtatcaacgcagagtacnnactaaccgnntgtgtcganntttttttttttttttttttttttttttttt

SEQ ID NO: 5830 - DNA, 84 bp, synthetic construct
  source 1..84: mol_type = other DNA
tttttttaagcagtggtatcaacgcagagtacnnactaaccgnngagcatganntttttttttttttttttttttttttttttt

SEQ ID NO: 5831 - DNA, 84 bp, synthetic construct
  source 1..84: mol_type = other DNA
tttttttaagcagtggtatcaacgcagagtacnnactaaccgnntcgaagtcnntttttttttttttttttttttttttttttt

SEQ ID NO: 5832 - DNA, 84 bp, synthetic construct
  source 1..84: mol_type = other DNA
tttttttaagcagtggtatcaacgcagagtacnnactaaccgnnggtgaacanntttttttttttttttttttttttttttttt

SEQ ID NO: 5833 - DNA, 84 bp, synthetic construct
  source 1..84: mol_type = other DNA
tttttttaagcagtggtatcaacgcagagtacnnactaaccgnnacatgcacnntttttttttttttttttttttttttttttt

SEQ ID NO: 5834 - DNA, 84 bp, synthetic construct
  source 1..84: mol_type = other DNA
tttttttaagcagtggtatcaacgcagagtacnnactaaccgnnccaacagtnntttttttttttttttttttttttttttttt

SEQ ID NO: 5835 - DNA, 84 bp, synthetic construct
  source 1..84: mol_type = other DNA
tttttttaagcagtggtatcaacgcagagtacnnactaaccgnnagaacagcnntttttttttttttttttttttttttttttt

SEQ ID NO: 5836 - DNA, 84 bp, synthetic construct
  source 1..84: mol_type = other DNA
tttttttaagcagtggtatcaacgcagagtacnnactaaccgnngaacacgtnntttttttttttttttttttttttttttttt

SEQ ID NO: 5837 - DNA, 84 bp, synthetic construct
  source 1..84: mol_type = other DNA
tttttttaagcagtggtatcaacgcagagtacnnactaaccgnnggtcttcanntttttttttttttttttttttttttttttt

SEQ ID NO: 5838 - DNA, 84 bp, synthetic construct
  source 1..84: mol_type = other DNA
tttttttaagcagtggtatcaacgcagagtacnnactaaccgnnaggttcagnntttttttttttttttttttttttttttttt

SEQ ID NO: 5839 - DNA, 84 bp, synthetic construct
  source 1..84: mol_type = other DNA
tttttttaagcagtggtatcaacgcagagtacnnactaaccgnnctagagcanntttttttttttttttttttttttttttttt

SEQ ID NO: 5840 - DNA, 84 bp, synthetic construct
  source 1..84: mol_type = other DNA
tttttttaagcagtggtatcaacgcagagtacnnactaaccgnncttctagcnntttttttttttttttttttttttttttttt

SEQ ID NO: 5841 - DNA, 84 bp, synthetic construct
  source 1..84: mol_type = other DNA
tttttttaagcagtggtatcaacgcagagtacnnactaaccgnngagtaacgnntttttttttttttttttttttttttttttt

SEQ ID NO: 5842 - DNA, 84 bp, synthetic construct
  source 1..84: mol_type = other DNA
tttttttaagcagtggtatcaacgcagagtacnnactaaccgnnctaagaggnntttttttttttttttttttttttttttttt

SEQ ID NO: 5843 - DNA, 84 bp, synthetic construct
  source 1..84: mol_type = other DNA
tttttttaagcagtggtatcaacgcagagtacnnactaaccgnnacgtgtagnntttttttttttttttttttttttttttttt

SEQ ID NO: 5844 - DNA, 84 bp, synthetic construct
  source 1..84: mol_type = other DNA
tttttttaagcagtggtatcaacgcagagtacnnactaaccgnnactacaggnntttttttttttttttttttttttttttttt

SEQ ID NO: 5845 - DNA, 84 bp, synthetic construct
  source 1..84: mol_type = other DNA
tttttttaagcagtggtatcaacgcagagtacnnactaaccgnntacaggtcnntttttttttttttttttttttttttttttt

SEQ ID NO: 5846 - DNA, 84 bp, synthetic construct
  source 1..84: mol_type = other DNA
tttttttaagcagtggtatcaacgcagagtacnnactaaccgnnctcacatgnntttttttttttttttttttttttttttttt

SEQ ID NO: 5847 - DNA, 84 bp, synthetic construct
  source 1..84: mol_type = other DNA
tttttttaagcagtggtatcaacgcagagtacnnactaaccgnnactaggagnntttttttttttttttttttttttttttttt

SEQ ID NO: 5848 - DNA, 84 bp, synthetic construct
  source 1..84: mol_type = other DNA
tttttttaagcagtggtatcaacgcagagtacnnactaaccgnnccatagganntttttttttttttttttttttttttttttt

SEQ ID NO: 5849 - DNA, 84 bp, synthetic construct
  source 1..84: mol_type = other DNA
tttttttaagcagtggtatcaacgcagagtacnnactaaccgnnggagaatcnntttttttttttttttttttttttttttttt

SEQ ID NO: 5850 - DNA, 84 bp, synthetic construct
  source 1..84: mol_type = other DNA
tttttttaagcagtggtatcaacgcagagtacnnactaaccgnngccaagaanntttttttttttttttttttttttttttttt

SEQ ID NO: 5851 - DNA, 84 bp, synthetic construct
  source 1..84: mol_type = other DNA
tttttttaagcagtggtatcaacgcagagtacnnactaaccgnnaaggcaagnntttttttttttttttttttttttttttttt

SEQ ID NO: 5852 - DNA, 84 bp, synthetic construct
  source 1..84: mol_type = other DNA
tttttttaagcagtggtatcaacgcagagtacnnactaaccgnnaatgtcgcnntttttttttttttttttttttttttttttt

SEQ ID NO: 5853 - DNA, 84 bp, synthetic construct
  source 1..84: mol_type = other DNA
tttttttaagcagtggtatcaacgcagagtacnnactaaccgnnatggaaccnntttttttttttttttttttttttttttttt

SEQ ID NO: 5854 - DNA, 84 bp, synthetic construct
  source 1..84: mol_type = other DNA
tttttttaagcagtggtatcaacgcagagtacnnactaaccgnnagaggcatnntttttttttttttttttttttttttttttt

SEQ ID NO: 5855 - DNA, 84 bp, synthetic construct
  source 1..84: mol_type = other DNA
tttttttaagcagtggtatcaacgcagagtacnnactaaccgnntgcatagcnntttttttttttttttttttttttttttttt

SEQ ID NO: 5856 - DNA, 84 bp, synthetic construct
  source 1..84: mol_type = other DNA
tttttttaagcagtggtatcaacgcagagtacnnactaaccgnnctaacgganntttttttttttttttttttttttttttttt

SEQ ID NO: 5857 - DNA, 84 bp, synthetic construct
  source 1..84: mol_type = other DNA
tttttttaagcagtggtatcaacgcagagtacnnactaaccgnntatcgaggnntttttttttttttttttttttttttttttt

SEQ ID NO: 5858 - DNA, 84 bp, synthetic construct
  source 1..84: mol_type = other DNA
tttttttaagcagtggtatcaacgcagagtacnnactaaccgnncatagcctnntttttttttttttttttttttttttttttt

SEQ ID NO: 5859 - DNA, 84 bp, synthetic construct
  source 1..84: mol_type = other DNA
tttttttaagcagtggtatcaacgcagagtacnnactaaccgnnatcgagacnntttttttttttttttttttttttttttttt

SEQ ID NO: 5860 - DNA, 84 bp, synthetic construct
  source 1..84: mol_type = other DNA
tttttttaagcagtggtatcaacgcagagtacnnactaaccgnnggaagagtnntttttttttttttttttttttttttttttt

SEQ ID NO: 5861 - DNA, 84 bp, synthetic construct
  source 1..84: mol_type = other DNA
tttttttaagcagtggtatcaacgcagagtacnnactaaccgnnccaagtagnntttttttttttttttttttttttttttttt

SEQ ID NO: 5862 - DNA, 84 bp, synthetic construct
  source 1..84: mol_type = other DNA
tttttttaagcagtggtatcaacgcagagtacnnactaaccgnnctgaacagnntttttttttttttttttttttttttttttt

SEQ ID NO: 5863 - DNA, 84 bp, synthetic construct
  source 1..84: mol_type = other DNA
tttttttaagcagtggtatcaacgcagagtacnnactaaccgnngtaggttcnntttttttttttttttttttttttttttttt

SEQ ID NO: 5864 - DNA, 84 bp, synthetic construct
  source 1..84: mol_type = other DNA
tttttttaagcagtggtatcaacgcagagtacnnactaaccgnngtatggacnntttttttttttttttttttttttttttttt

SEQ ID NO: 5865 - DNA, 84 bp, synthetic construct
  source 1..84: mol_type = other DNA
tttttttaagcagtggtatcaacgcagagtacnnactaaccgnntcgcaacanntttttttttttttttttttttttttttttt

SEQ ID NO: 5866 - DNA, 84 bp, synthetic construct
  source 1..84: mol_type = other DNA
tttttttaagcagtggtatcaacgcagagtacnnactaaccgnnccgctaatnntttttttttttttttttttttttttttttt

SEQ ID NO: 5867 - DNA, 84 bp, synthetic construct
  source 1..84: mol_type = other DNA
tttttttaagcagtggtatcaacgcagagtacnnactaaccgnngattcgcanntttttttttttttttttttttttttttttt

SEQ ID NO: 5868 - DNA, 84 bp, synthetic construct
  source 1..84: mol_type = other DNA
tttttttaagcagtggtatcaacgcagagtacnnactaaccgnncgatggaanntttttttttttttttttttttttttttttt

SEQ ID NO: 5869 - DNA, 84 bp, synthetic construct
  source 1..84: mol_type = other DNA
tttttttaagcagtggtatcaacgcagagtacnnactaaccgnnagcaagganntttttttttttttttttttttttttttttt

SEQ ID NO: 5870 - DNA, 84 bp, synthetic construct
  source 1..84: mol_type = other DNA
tttttttaagcagtggtatcaacgcagagtacnnactaaccgnncgtagcaanntttttttttttttttttttttttttttttt

SEQ ID NO: 5871 - DNA, 84 bp, synthetic construct
  source 1..84: mol_type = other DNA
tttttttaagcagtggtatcaacgcagagtacnnactaaccgnntggcagtanntttttttttttttttttttttttttttttt

SEQ ID NO: 5872 - DNA, 84 bp, synthetic construct
  source 1..84: mol_type = other DNA
tttttttaagcagtggtatcaacgcagagtacnnactaaccgnncggtagttnntttttttttttttttttttttttttttttt

SEQ ID NO: 5873 - DNA, 84 bp, synthetic construct
  source 1..84: mol_type = other DNA
tttttttaagcagtggtatcaacgcagagtacnnactaaccgnntgacttcgnntttttttttttttttttttttttttttttt

SEQ ID NO: 5874 - DNA, 84 bp, synthetic construct
  source 1..84: mol_type = other DNA
tttttttaagcagtggtatcaacgcagagtacnnactaaccgnngagtgcaanntttttttttttttttttttttttttttttt

SEQ ID NO: 5875 - DNA, 84 bp, synthetic construct
  source 1..84: mol_type = other DNA
tttttttaagcagtggtatcaacgcagagtacnnactaaccgnnacggtaacnntttttttttttttttttttttttttttttt

SEQ ID NO: 5876 - DNA, 84 bp, synthetic construct
  source 1..84: mol_type = other DNA
tttttttaagcagtggtatcaacgcagagtacnnactaaccgnnaagtggtgnntttttttttttttttttttttttttttttt

SEQ ID NO: 5877 - DNA, 84 bp, synthetic construct
  source 1..84: mol_type = other DNA
tttttttaagcagtggtatcaacgcagagtacnnactaaccgnnggagacaanntttttttttttttttttttttttttttttt

SEQ ID NO: 5878 - DNA, 84 bp, synthetic construct
  source 1..84: mol_type = other DNA
tttttttaagcagtggtatcaacgcagagtacnnactaaccgnntcaaggacnntttttttttttttttttttttttttttttt

SEQ ID NO: 5879 - DNA, 84 bp, synthetic construct
  source 1..84: mol_type = other DNA
tttttttaagcagtggtatcaacgcagagtacnnactaaccgnnaagagagcnntttttttttttttttttttttttttttttt

SEQ ID NO: 5880 - DNA, 84 bp, synthetic construct
  source 1..84: mol_type = other DNA
tttttttaagcagtggtatcaacgcagagtacnnactaaccgnncgagagatnntttttttttttttttttttttttttttttt

SEQ ID NO: 5881 - DNA, 84 bp, synthetic construct
  source 1..84: mol_type = other DNA
tttttttaagcagtggtatcaacgcagagtacnnactaaccgnnacagatggnntttttttttttttttttttttttttttttt

SEQ ID NO: 5882 - DNA, 84 bp, synthetic construct
  source 1..84: mol_type = other DNA
tttttttaagcagtggtatcaacgcagagtacnnactaaccgnnaggagtcanntttttttttttttttttttttttttttttt

SEQ ID NO: 5883 - DNA, 84 bp, synthetic construct
  source 1..84: mol_type = other DNA
tttttttaagcagtggtatcaacgcagagtacnnactaaccgnncgtgttacnntttttttttttttttttttttttttttttt

SEQ ID NO: 5884 - DNA, 84 bp, synthetic construct
  source 1..84: mol_type = other DNA
tttttttaagcagtggtatcaacgcagagtacnnactaaccgnntagtgtgcnntttttttttttttttttttttttttttttt

SEQ ID NO: 5885 - DNA, 84 bp, synthetic construct
  source 1..84: mol_type = other DNA
tttttttaagcagtggtatcaacgcagagtacnnactaaccgnnctcatgacnntttttttttttttttttttttttttttttt

SEQ ID NO: 5886 - DNA, 84 bp, synthetic construct
  source 1..84: mol_type = other DNA
tttttttaagcagtggtatcaacgcagagtacnnactaaccgnngtatccagnntttttttttttttttttttttttttttttt

SEQ ID NO: 5887 - DNA, 84 bp, synthetic construct
  source 1..84: mol_type = other DNA
tttttttaagcagtggtatcaacgcagagtacnnactaaccgnnacgcctatnntttttttttttttttttttttttttttttt

SEQ ID NO: 5888 - DNA, 84 bp, synthetic construct
  source 1..84: mol_type = other DNA
tttttttaagcagtggtatcaacgcagagtacnnactaaccgnnaacgacctnntttttttttttttttttttttttttttttt

SEQ ID NO: 5889 - DNA, 84 bp, synthetic construct
  source 1..84: mol_type = other DNA
tttttttaagcagtggtatcaacgcagagtacnnactaaccgnnatcaggctnntttttttttttttttttttttttttttttt

SEQ ID NO: 5890 - DNA, 84 bp, synthetic construct
  source 1..84: mol_type = other DNA
tttttttaagcagtggtatcaacgcagagtacnnactaaccgnncaagttcgnntttttttttttttttttttttttttttttt

SEQ ID NO: 5891 - DNA, 84 bp, synthetic construct
  source 1..84: mol_type = other DNA
tttttttaagcagtggtatcaacgcagagtacnnactaaccgnntagccaganntttttttttttttttttttttttttttttt

SEQ ID NO: 5892 - DNA, 84 bp, synthetic construct
  source 1..84: mol_type = other DNA
tttttttaagcagtggtatcaacgcagagtacnnactaaccgnncaatcacgnntttttttttttttttttttttttttttttt

SEQ ID NO: 5893 - DNA, 84 bp, synthetic construct
  source 1..84: mol_type = other DNA
tttttttaagcagtggtatcaacgcagagtacnnactaaccgnngcaacaagnntttttttttttttttttttttttttttttt

SEQ ID NO: 5894 - DNA, 84 bp, synthetic construct
  source 1..84: mol_type = other DNA
tttttttaagcagtggtatcaacgcagagtacnnactaaccgnncacgacaanntttttttttttttttttttttttttttttt

SEQ ID NO: 5895 - DNA, 84 bp, synthetic construct
  source 1..84: mol_type = other DNA
tttttttaagcagtggtatcaacgcagagtacnnactaaccgnntacggaganntttttttttttttttttttttttttttttt

SEQ ID NO: 5896 - DNA, 84 bp, synthetic construct
  source 1..84: mol_type = other DNA
tttttttaagcagtggtatcaacgcagagtacnnactaaccgnncgacaaganntttttttttttttttttttttttttttttt

SEQ ID NO: 5897 - DNA, 84 bp, synthetic construct
  source 1..84: mol_type = other DNA
tttttttaagcagtggtatcaacgcagagtacnnactaaccgnncgaagtganntttttttttttttttttttttttttttttt

SEQ ID NO: 5898 - DNA, 84 bp, synthetic construct
  source 1..84: mol_type = other DNA
tttttttaagcagtggtatcaacgcagagtacnnactaaccgnnagctggtanntttttttttttttttttttttttttttttt

SEQ ID NO: 5899 - DNA, 84 bp, synthetic construct
  source 1..84: mol_type = other DNA
tttttttaagcagtggtatcaacgcagagtacnnactaaccgnnaactaggcnntttttttttttttttttttttttttttttt

SEQ ID NO: 5900 - DNA, 84 bp, synthetic construct
  source 1..84: mol_type = other DNA
tttttttaagcagtggtatcaacgcagagtacnnactaaccgnncagcaagtnntttttttttttttttttttttttttttttt

SEQ ID NO: 5901 - DNA, 84 bp, synthetic construct
  source 1..84: mol_type = other DNA
tttttttaagcagtggtatcaacgcagagtacnnactaaccgnnacgaggtanntttttttttttttttttttttttttttttt

SEQ ID NO: 5902 - DNA, 84 bp, synthetic construct
  source 1..84: mol_type = other DNA
tttttttaagcagtggtatcaacgcagagtacnnactaaccgnncatcttccnntttttttttttttttttttttttttttttt

SEQ ID NO: 5903 - DNA, 84 bp, synthetic construct
  source 1..84: mol_type = other DNA
tttttttaagcagtggtatcaacgcagagtacnnactaaccgnncctgaatcnntttttttttttttttttttttttttttttt

SEQ ID NO: 5904 - DNA, 84 bp, synthetic construct
  source 1..84: mol_type = other DNA
tttttttaagcagtggtatcaacgcagagtacnnactaaccgnntgcagactnntttttttttttttttttttttttttttttt

SEQ ID NO: 5905 - DNA, 84 bp, synthetic construct
  source 1..84: mol_type = other DNA
tttttttaagcagtggtatcaacgcagagtacnnactaaccgnnagatgtggnntttttttttttttttttttttttttttttt

SEQ ID NO: 5906 - DNA, 84 bp, synthetic construct
  source 1..84: mol_type = other DNA
tttttttaagcagtggtatcaacgcagagtacnnactaaccgnnagttcgacnntttttttttttttttttttttttttttttt

SEQ ID NO: 5907 - DNA, 84 bp, synthetic construct
  source 1..84: mol_type = other DNA
tttttttaagcagtggtatcaacgcagagtacnnactaaccgnnacaacctcnntttttttttttttttttttttttttttttt

SEQ ID NO: 5908 - DNA, 84 bp, synthetic construct
  source 1..84: mol_type = other DNA
tttttttaagcagtggtatcaacgcagagtacnnactaaccgnncatggtagnntttttttttttttttttttttttttttttt

SEQ ID NO: 5909 - DNA, 84 bp, synthetic construct
  source 1..84: mol_type = other DNA
tttttttaagcagtggtatcaacgcagagtacnnactaaccgnncgtatctcnntttttttttttttttttttttttttttttt

SEQ ID NO: 5910 - DNA, 84 bp, synthetic construct
  source 1..84: mol_type = other DNA
tttttttaagcagtggtatcaacgcagagtacnnactaaccgnncctagttcnntttttttttttttttttttttttttttttt

SEQ ID NO: 5911 - DNA, 84 bp, synthetic construct
  source 1..84: mol_type = other DNA
tttttttaagcagtggtatcaacgcagagtacnnactaaccgnncaagagtcnntttttttttttttttttttttttttttttt

SEQ ID NO: 5912 - DNA, 84 bp, synthetic construct
  source 1..84: mol_type = other DNA
tttttttaagcagtggtatcaacgcagagtacnngtgcacaannaatcggcanntttttttttttttttttttttttttttttt

SEQ ID NO: 5913 - DNA, 84 bp, synthetic construct
  source 1..84: mol_type = other DNA
tttttttaagcagtggtatcaacgcagagtacnngtgcacaanntacggcatnntttttttttttttttttttttttttttttt

SEQ ID NO: 5914 - DNA, 84 bp, synthetic construct
  source 1..84: mol_type = other DNA
tttttttaagcagtggtatcaacgcagagtacnngtgcacaannttggatcgnntttttttttttttttttttttttttttttt

SEQ ID NO: 5915 - DNA, 84 bp, synthetic construct
  source 1..84: mol_type = other DNA
tttttttaagcagtggtatcaacgcagagtacnngtgcacaanntggaacganntttttttttttttttttttttttttttttt

SEQ ID NO: 5916 - DNA, 84 bp, synthetic construct
  source 1..84: mol_type = other DNA
tttttttaagcagtggtatcaacgcagagtacnngtgcacaannggcaatcanntttttttttttttttttttttttttttttt

SEQ ID NO: 5917 - DNA, 84 bp, synthetic construct
  source 1..84: mol_type = other DNA
tttttttaagcagtggtatcaacgcagagtacnngtgcacaanngaatccganntttttttttttttttttttttttttttttt

SEQ ID NO: 5918 - DNA, 84 bp, synthetic construct
  source 1..84: mol_type = other DNA
tttttttaagcagtggtatcaacgcagagtacnngtgcacaannttacggtgnntttttttttttttttttttttttttttttt

SEQ ID NO: 5919 - DNA, 84 bp, synthetic construct
  source 1..84: mol_type = other DNA
tttttttaagcagtggtatcaacgcagagtacnngtgcacaanncatatcggnntttttttttttttttttttttttttttttt

SEQ ID NO: 5920 - DNA, 84 bp, synthetic construct
  source 1..84: mol_type = other DNA
tttttttaagcagtggtatcaacgcagagtacnngtgcacaanncttcggtanntttttttttttttttttttttttttttttt

SEQ ID NO: 5921 - DNA, 84 bp, synthetic construct
  source 1..84: mol_type = other DNA
tttttttaagcagtggtatcaacgcagagtacnngtgcacaanntcctaacgnntttttttttttttttttttttttttttttt

SEQ ID NO: 5922 - DNA, 84 bp, synthetic construct
  source 1..84: mol_type = other DNA
tttttttaagcagtggtatcaacgcagagtacnngtgcacaanngtaagccanntttttttttttttttttttttttttttttt

SEQ ID NO: 5923 - DNA, 84 bp, synthetic construct
  source 1..84: mol_type = other DNA
tttttttaagcagtggtatcaacgcagagtacnngtgcacaanntaaggtggnntttttttttttttttttttttttttttttt

SEQ ID NO: 5924 - DNA, 84 bp, synthetic construct
  source 1..84: mol_type = other DNA
tttttttaagcagtggtatcaacgcagagtacnngtgcacaannggtaagctnntttttttttttttttttttttttttttttt

SEQ ID NO: 5925 - DNA, 84 bp, synthetic construct
  source 1..84: mol_type = other DNA
tttttttaagcagtggtatcaacgcagagtacnngtgcacaanntgtgtcganntttttttttttttttttttttttttttttt

SEQ ID NO: 5926 - DNA, 84 bp, synthetic construct
  source 1..84: mol_type = other DNA
tttttttaagcagtggtatcaacgcagagtacnngtgcacaanngagcatganntttttttttttttttttttttttttttttt

SEQ ID NO: 5927 - DNA, 84 bp, synthetic construct
  source 1..84: mol_type = other DNA
tttttttaagcagtggtatcaacgcagagtacnngtgcacaanntcgaagtcnntttttttttttttttttttttttttttttt

SEQ ID NO: 5928 - DNA, 84 bp, synthetic construct
  source 1..84: mol_type = other DNA
tttttttaagcagtggtatcaacgcagagtacnngtgcacaannggtgaacanntttttttttttttttttttttttttttttt

SEQ ID NO: 5929 - DNA, 84 bp, synthetic construct
  source 1..84: mol_type = other DNA
tttttttaagcagtggtatcaacgcagagtacnngtgcacaannacatgcacnntttttttttttttttttttttttttttttt

SEQ ID NO: 5930 - DNA, 84 bp, synthetic construct
  source 1..84: mol_type = other DNA
tttttttaagcagtggtatcaacgcagagtacnngtgcacaannccaacagtnntttttttttttttttttttttttttttttt

SEQ ID NO: 5931 - DNA, 84 bp, synthetic construct
  source 1..84: mol_type = other DNA
tttttttaagcagtggtatcaacgcagagtacnngtgcacaannagaacagcnntttttttttttttttttttttttttttttt

SEQ ID NO: 5932 - DNA, 84 bp, synthetic construct
  source 1..84: mol_type = other DNA
tttttttaagcagtggtatcaacgcagagtacnngtgcacaanngaacacgtnntttttttttttttttttttttttttttttt

SEQ ID NO: 5933 - DNA, 84 bp, synthetic construct
  source 1..84: mol_type = other DNA
tttttttaagcagtggtatcaacgcagagtacnngtgcacaannggtcttcanntttttttttttttttttttttttttttttt

SEQ ID NO: 5934 - DNA, 84 bp, synthetic construct
  source 1..84: mol_type = other DNA
tttttttaagcagtggtatcaacgcagagtacnngtgcacaannaggttcagnntttttttttttttttttttttttttttttt

SEQ ID NO: 5935 - DNA, 84 bp, synthetic construct
  source 1..84: mol_type = other DNA
tttttttaagcagtggtatcaacgcagagtacnngtgcacaannctagagcanntttttttttttttttttttttttttttttt

SEQ ID NO: 5936 - DNA, 84 bp, synthetic construct
  source 1..84: mol_type = other DNA
tttttttaagcagtggtatcaacgcagagtacnngtgcacaanncttctagcnntttttttttttttttttttttttttttttt

SEQ ID NO: 5937 - DNA, 84 bp, synthetic construct
  source 1..84: mol_type = other DNA
tttttttaagcagtggtatcaacgcagagtacnngtgcacaanngagtaacgnntttttttttttttttttttttttttttttt

SEQ ID NO: 5938 - DNA, 84 bp, synthetic construct
  source 1..84: mol_type = other DNA
tttttttaagcagtggtatcaacgcagagtacnngtgcacaannctaagaggnntttttttttttttttttttttttttttttt

SEQ ID NO: 5939 - DNA, 84 bp, synthetic construct
  source 1..84: mol_type = other DNA
tttttttaagcagtggtatcaacgcagagtacnngtgcacaannacgtgtagnntttttttttttttttttttttttttttttt

SEQ ID NO: 5940 - DNA, 84 bp, synthetic construct
  source 1..84: mol_type = other DNA
tttttttaagcagtggtatcaacgcagagtacnngtgcacaannactacaggnntttttttttttttttttttttttttttttt

SEQ ID NO: 5941 - DNA, 84 bp, synthetic construct
  source 1..84: mol_type = other DNA
tttttttaagcagtggtatcaacgcagagtacnngtgcacaanntacaggtcnntttttttttttttttttttttttttttttt

SEQ ID NO: 5942 - DNA, 84 bp, synthetic construct
  source 1..84: mol_type = other DNA
tttttttaagcagtggtatcaacgcagagtacnngtgcacaannctcacatgnntttttttttttttttttttttttttttttt

SEQ ID NO: 5943 - DNA, 84 bp, synthetic construct
  source 1..84: mol_type = other DNA
tttttttaagcagtggtatcaacgcagagtacnngtgcacaannactaggagnntttttttttttttttttttttttttttttt

SEQ ID NO: 5944 - DNA, 84 bp, synthetic construct
  source 1..84: mol_type = other DNA
tttttttaagcagtggtatcaacgcagagtacnngtgcacaannccatagganntttttttttttttttttttttttttttttt

SEQ ID NO: 5945 - DNA, 84 bp, synthetic construct
  source 1..84: mol_type = other DNA
tttttttaagcagtggtatcaacgcagagtacnngtgcacaannggagaatcnntttttttttttttttttttttttttttttt

SEQ ID NO: 5946 - DNA, 84 bp, synthetic construct
  source 1..84: mol_type = other DNA
tttttttaagcagtggtatcaacgcagagtacnngtgcacaanngccaagaanntttttttttttttttttttttttttttttt

SEQ ID NO: 5947 - DNA, 84 bp, synthetic construct
  source 1..84: mol_type = other DNA
tttttttaagcagtggtatcaacgcagagtacnngtgcacaannaaggcaagnntttttttttttttttttttttttttttttt

SEQ ID NO: 5948 - DNA, 84 bp, synthetic construct
  source 1..84: mol_type = other DNA
tttttttaagcagtggtatcaacgcagagtacnngtgcacaannaatgtcgcnntttttttttttttttttttttttttttttt

SEQ ID NO: 5949 - DNA, 84 bp, synthetic construct
  source 1..84: mol_type = other DNA
tttttttaagcagtggtatcaacgcagagtacnngtgcacaannatggaaccnntttttttttttttttttttttttttttttt

SEQ ID NO: 5950 - DNA, 84 bp, synthetic construct
  source 1..84: mol_type = other DNA
tttttttaagcagtggtatcaacgcagagtacnngtgcacaannagaggcatnntttttttttttttttttttttttttttttt

SEQ ID NO: 5951 - DNA, 84 bp, synthetic construct
  source 1..84: mol_type = other DNA
tttttttaagcagtggtatcaacgcagagtacnngtgcacaanntgcatagcnntttttttttttttttttttttttttttttt

SEQ ID NO: 5952 - DNA, 84 bp, synthetic construct
  source 1..84: mol_type = other DNA
tttttttaagcagtggtatcaacgcagagtacnngtgcacaannctaacgganntttttttttttttttttttttttttttttt

SEQ ID NO: 5953 - DNA, 84 bp, synthetic construct
  source 1..84: mol_type = other DNA
tttttttaagcagtggtatcaacgcagagtacnngtgcacaanntatcgaggnntttttttttttttttttttttttttttttt

SEQ ID NO: 5954 - DNA, 84 bp, synthetic construct
  source 1..84: mol_type = other DNA
tttttttaagcagtggtatcaacgcagagtacnngtgcacaanncatagcctnntttttttttttttttttttttttttttttt

SEQ ID NO: 5955 - DNA, 84 bp, synthetic construct
  source 1..84: mol_type = other DNA
tttttttaagcagtggtatcaacgcagagtacnngtgcacaannatcgagacnntttttttttttttttttttttttttttttt

SEQ ID NO: 5956 - DNA, 84 bp, synthetic construct
  source 1..84: mol_type = other DNA
tttttttaagcagtggtatcaacgcagagtacnngtgcacaannggaagagtnntttttttttttttttttttttttttttttt

SEQ ID NO: 5957 - DNA, 84 bp, synthetic construct
  source 1..84: mol_type = other DNA
tttttttaagcagtggtatcaacgcagagtacnngtgcacaannccaagtagnntttttttttttttttttttttttttttttt

SEQ ID NO: 5958 - DNA, 84 bp, synthetic construct
  source 1..84: mol_type = other DNA
tttttttaagcagtggtatcaacgcagagtacnngtgcacaannctgaacagnntttttttttttttttttttttttttttttt

SEQ ID NO: 5959 - DNA, 84 bp, synthetic construct
  source 1..84: mol_type = other DNA
tttttttaagcagtggtatcaacgcagagtacnngtgcacaanngtaggttcnntttttttttttttttttttttttttttttt

SEQ ID NO: 5960 - DNA, 84 bp, synthetic construct
  source 1..84: mol_type = other DNA
tttttttaagcagtggtatcaacgcagagtacnngtgcacaanngtatggacnntttttttttttttttttttttttttttttt

SEQ ID NO: 5961 - DNA, 84 bp, synthetic construct
  source 1..84: mol_type = other DNA
tttttttaagcagtggtatcaacgcagagtacnngtgcacaanntcgcaacanntttttttttttttttttttttttttttttt

SEQ ID NO: 5962 - DNA, 84 bp, synthetic construct
  source 1..84: mol_type = other DNA
tttttttaagcagtggtatcaacgcagagtacnngtgcacaannccgctaatnntttttttttttttttttttttttttttttt

SEQ ID NO: 5963 - DNA, 84 bp, synthetic construct
  source 1..84: mol_type = other DNA
tttttttaagcagtggtatcaacgcagagtacnngtgcacaanngattcgcanntttttttttttttttttttttttttttttt

SEQ ID NO: 5964 - DNA, 84 bp, synthetic construct
  source 1..84: mol_type = other DNA
tttttttaagcagtggtatcaacgcagagtacnngtgcacaanncgatggaanntttttttttttttttttttttttttttttt

SEQ ID NO: 5965 - DNA, 84 bp, synthetic construct
  source 1..84: mol_type = other DNA
tttttttaagcagtggtatcaacgcagagtacnngtgcacaannagcaagganntttttttttttttttttttttttttttttt

SEQ ID NO: 5966 - DNA, 84 bp, synthetic construct
  source 1..84: mol_type = other DNA
tttttttaagcagtggtatcaacgcagagtacnngtgcacaanncgtagcaanntttttttttttttttttttttttttttttt

SEQ ID NO: 5967 - DNA, 84 bp, synthetic construct
  source 1..84: mol_type = other DNA
tttttttaagcagtggtatcaacgcagagtacnngtgcacaanntggcagtanntttttttttttttttttttttttttttttt

SEQ ID NO: 5968 - DNA, 84 bp, synthetic construct
  source 1..84: mol_type = other DNA
tttttttaagcagtggtatcaacgcagagtacnngtgcacaanncggtagttnntttttttttttttttttttttttttttttt

SEQ ID NO: 5969 - DNA, 84 bp, synthetic construct
  source 1..84: mol_type = other DNA
tttttttaagcagtggtatcaacgcagagtacnngtgcacaanntgacttcgnntttttttttttttttttttttttttttttt

SEQ ID NO: 5970 - DNA, 84 bp, synthetic construct
  source 1..84: mol_type = other DNA
tttttttaagcagtggtatcaacgcagagtacnngtgcacaanngagtgcaanntttttttttttttttttttttttttttttt

SEQ ID NO: 5971 - DNA, 84 bp, synthetic construct
  source 1..84: mol_type = other DNA
tttttttaagcagtggtatcaacgcagagtacnngtgcacaannacggtaacnntttttttttttttttttttttttttttttt

SEQ ID NO: 5972 - DNA, 84 bp, synthetic construct
  source 1..84: mol_type = other DNA
tttttttaagcagtggtatcaacgcagagtacnngtgcacaannaagtggtgnntttttttttttttttttttttttttttttt

SEQ ID NO: 5973 - DNA, 84 bp, synthetic construct
  source 1..84: mol_type = other DNA
tttttttaagcagtggtatcaacgcagagtacnngtgcacaannggagacaanntttttttttttttttttttttttttttttt

SEQ ID NO: 5974 - DNA, 84 bp, synthetic construct
  source 1..84: mol_type = other DNA
tttttttaagcagtggtatcaacgcagagtacnngtgcacaanntcaaggacnntttttttttttttttttttttttttttttt

SEQ ID NO: 5975 - DNA, 84 bp, synthetic construct
  source 1..84: mol_type = other DNA
tttttttaagcagtggtatcaacgcagagtacnngtgcacaannaagagagcnntttttttttttttttttttttttttttttt

SEQ ID NO: 5976 - DNA, 84 bp, synthetic construct
  source 1..84: mol_type = other DNA
tttttttaagcagtggtatcaacgcagagtacnngtgcacaanncgagagatnntttttttttttttttttttttttttttttt

SEQ ID NO: 5977 - DNA, 84 bp, synthetic construct
  source 1..84: mol_type = other DNA
tttttttaagcagtggtatcaacgcagagtacnngtgcacaannacagatggnntttttttttttttttttttttttttttttt

SEQ ID NO: 5978 - DNA, 84 bp, synthetic construct
  source 1..84: mol_type = other DNA
tttttttaagcagtggtatcaacgcagagtacnngtgcacaannaggagtcanntttttttttttttttttttttttttttttt

SEQ ID NO: 5979 - DNA, 84 bp, synthetic construct
  source 1..84: mol_type = other DNA
tttttttaagcagtggtatcaacgcagagtacnngtgcacaanncgtgttacnntttttttttttttttttttttttttttttt

SEQ ID NO: 5980 - DNA, 84 bp, synthetic construct
  source 1..84: mol_type = other DNA
tttttttaagcagtggtatcaacgcagagtacnngtgcacaanntagtgtgcnntttttttttttttttttttttttttttttt

SEQ ID NO: 5981 - DNA, 84 bp, synthetic construct
  source 1..84: mol_type = other DNA
tttttttaagcagtggtatcaacgcagagtacnngtgcacaannctcatgacnntttttttttttttttttttttttttttttt

SEQ ID NO: 5982 - DNA, 84 bp, synthetic construct
  source 1..84: mol_type = other DNA
tttttttaagcagtggtatcaacgcagagtacnngtgcacaanngtatccagnntttttttttttttttttttttttttttttt

SEQ ID NO: 5983 - DNA, 84 bp, synthetic construct
  source 1..84: mol_type = other DNA
tttttttaagcagtggtatcaacgcagagtacnngtgcacaannacgcctatnntttttttttttttttttttttttttttttt

SEQ ID NO: 5984 - DNA, 84 bp, synthetic construct
  source 1..84: mol_type = other DNA
tttttttaagcagtggtatcaacgcagagtacnngtgcacaannaacgacctnntttttttttttttttttttttttttttttt

SEQ ID NO: 5985 - DNA, 84 bp, synthetic construct
  source 1..84: mol_type = other DNA
tttttttaagcagtggtatcaacgcagagtacnngtgcacaannatcaggctnntttttttttttttttttttttttttttttt

SEQ ID NO: 5986 - DNA, 84 bp, synthetic construct
  source 1..84: mol_type = other DNA
tttttttaagcagtggtatcaacgcagagtacnngtgcacaanncaagttcgnntttttttttttttttttttttttttttttt

SEQ ID NO: 5987 - DNA, 84 bp, synthetic construct
  source 1..84: mol_type = other DNA
tttttttaagcagtggtatcaacgcagagtacnngtgcacaanntagccaganntttttttttttttttttttttttttttttt

SEQ ID NO: 5988 - DNA, 84 bp, synthetic construct
  source 1..84: mol_type = other DNA
tttttttaagcagtggtatcaacgcagagtacnngtgcacaanncaatcacgnntttttttttttttttttttttttttttttt

SEQ ID NO: 5989 - DNA, 84 bp, synthetic construct
  source 1..84: mol_type = other DNA
tttttttaagcagtggtatcaacgcagagtacnngtgcacaanngcaacaagnntttttttttttttttttttttttttttttt

SEQ ID NO: 5990 - DNA, 84 bp, synthetic construct
  source 1..84: mol_type = other DNA
tttttttaagcagtggtatcaacgcagagtacnngtgcacaanncacgacaanntttttttttttttttttttttttttttttt

SEQ ID NO: 5991 - DNA, 84 bp, synthetic construct
  source 1..84: mol_type = other DNA
tttttttaagcagtggtatcaacgcagagtacnngtgcacaanntacggaganntttttttttttttttttttttttttttttt

SEQ ID NO: 5992 - DNA, 84 bp, synthetic construct
  source 1..84: mol_type = other DNA
tttttttaagcagtggtatcaacgcagagtacnngtgcacaanncgacaaganntttttttttttttttttttttttttttttt

SEQ ID NO: 5993 - DNA, 84 bp, synthetic construct
  source 1..84: mol_type = other DNA
tttttttaagcagtggtatcaacgcagagtacnngtgcacaanncgaagtganntttttttttttttttttttttttttttttt

SEQ ID NO: 5994 - DNA, 84 bp, synthetic construct
  source 1..84: mol_type = other DNA
tttttttaagcagtggtatcaacgcagagtacnngtgcacaannagctggtanntttttttttttttttttttttttttttttt

SEQ ID NO: 5995 - DNA, 84 bp, synthetic construct
  source 1..84: mol_type = other DNA
tttttttaagcagtggtatcaacgcagagtacnngtgcacaannaactaggcnntttttttttttttttttttttttttttttt

SEQ ID NO: 5996 - DNA, 84 bp, synthetic construct
  source 1..84: mol_type = other DNA
tttttttaagcagtggtatcaacgcagagtacnngtgcacaanncagcaagtnntttttttttttttttttttttttttttttt

SEQ ID NO: 5997 - DNA, 84 bp, synthetic construct
  source 1..84: mol_type = other DNA
tttttttaagcagtggtatcaacgcagagtacnngtgcacaannacgaggtanntttttttttttttttttttttttttttttt

SEQ ID NO: 5998 - DNA, 84 bp, synthetic construct
  source 1..84: mol_type = other DNA
tttttttaagcagtggtatcaacgcagagtacnngtgcacaanncatcttccnntttttttttttttttttttttttttttttt

SEQ ID NO: 5999 - DNA, 84 bp, synthetic construct
  source 1..84: mol_type = other DNA
tttttttaagcagtggtatcaacgcagagtacnngtgcacaanncctgaatcnntttttttttttttttttttttttttttttt

SEQ ID NO: 6000 - DNA, 84 bp, synthetic construct
  source 1..84: mol_type = other DNA
tttttttaagcagtggtatcaacgcagagtacnngtgcacaanntgcagactnntttttttttttttttttttttttttttttt

SEQ ID NO: 6001 - DNA, 84 bp, synthetic construct
  source 1..84: mol_type = other DNA
tttttttaagcagtggtatcaacgcagagtacnngtgcacaannagatgtggnntttttttttttttttttttttttttttttt

SEQ ID NO: 6002 - DNA, 84 bp, synthetic construct
  source 1..84: mol_type = other DNA
tttttttaagcagtggtatcaacgcagagtacnngtgcacaannagttcgacnntttttttttttttttttttttttttttttt

SEQ ID NO: 6003 - DNA, 84 bp, synthetic construct
  source 1..84: mol_type = other DNA
tttttttaagcagtggtatcaacgcagagtacnngtgcacaannacaacctcnntttttttttttttttttttttttttttttt

SEQ ID NO: 6004 - DNA, 84 bp, synthetic construct
  source 1..84: mol_type = other DNA
tttttttaagcagtggtatcaacgcagagtacnngtgcacaanncatggtagnntttttttttttttttttttttttttttttt

SEQ ID NO: 6005 - DNA, 84 bp, synthetic construct
  source 1..84: mol_type = other DNA
tttttttaagcagtggtatcaacgcagagtacnngtgcacaanncgtatctcnntttttttttttttttttttttttttttttt

SEQ ID NO: 6006 - DNA, 84 bp, synthetic construct
  source 1..84: mol_type = other DNA
tttttttaagcagtggtatcaacgcagagtacnngtgcacaanncctagttcnntttttttttttttttttttttttttttttt

SEQ ID NO: 6007 - DNA, 84 bp, synthetic construct
  source 1..84: mol_type = other DNA
tttttttaagcagtggtatcaacgcagagtacnngtgcacaanncaagagtcnntttttttttttttttttttttttttttttt

SEQ ID NO: 6008 - DNA, 84 bp, synthetic construct
  source 1..84: mol_type = other DNA
tttttttaagcagtggtatcaacgcagagtacnncctatccannaatcggcanntttttttttttttttttttttttttttttt

SEQ ID NO: 6009 - DNA, 84 bp, synthetic construct
  source 1..84: mol_type = other DNA
tttttttaagcagtggtatcaacgcagagtacnncctatccanntacggcatnntttttttttttttttttttttttttttttt

SEQ ID NO: 6010 - DNA, 84 bp, synthetic construct
  source 1..84: mol_type = other DNA
tttttttaagcagtggtatcaacgcagagtacnncctatccannttggatcgnntttttttttttttttttttttttttttttt

SEQ ID NO: 6011 - DNA, 84 bp, synthetic construct
  source 1..84: mol_type = other DNA
tttttttaagcagtggtatcaacgcagagtacnncctatccanntggaacganntttttttttttttttttttttttttttttt

SEQ ID NO: 6012 - DNA, 84 bp, synthetic construct
  source 1..84: mol_type = other DNA
tttttttaagcagtggtatcaacgcagagtacnncctatccannggcaatcanntttttttttttttttttttttttttttttt

SEQ ID NO: 6013 - DNA, 84 bp, synthetic construct
  source 1..84: mol_type = other DNA
tttttttaagcagtggtatcaacgcagagtacnncctatccanngaatccganntttttttttttttttttttttttttttttt

SEQ ID NO: 6014 - DNA, 84 bp, synthetic construct
  source 1..84: mol_type = other DNA
tttttttaagcagtggtatcaacgcagagtacnncctatccannttacggtgnntttttttttttttttttttttttttttttt

SEQ ID NO: 6015 - DNA, 84 bp, synthetic construct
  source 1..84: mol_type = other DNA
tttttttaagcagtggtatcaacgcagagtacnncctatccanncatatcggnntttttttttttttttttttttttttttttt

SEQ ID NO: 6016 - DNA, 84 bp, synthetic construct
  source 1..84: mol_type = other DNA
tttttttaagcagtggtatcaacgcagagtacnncctatccanncttcggtanntttttttttttttttttttttttttttttt

SEQ ID NO: 6017 - DNA, 84 bp, synthetic construct
  source 1..84: mol_type = other DNA
tttttttaagcagtggtatcaacgcagagtacnncctatccanntcctaacgnntttttttttttttttttttttttttttttt

SEQ ID NO: 6018 - DNA, 84 bp, synthetic construct
  source 1..84: mol_type = other DNA
tttttttaagcagtggtatcaacgcagagtacnncctatccanngtaagccanntttttttttttttttttttttttttttttt

SEQ ID NO: 6019 - DNA, 84 bp, synthetic construct
  source 1..84: mol_type = other DNA
tttttttaagcagtggtatcaacgcagagtacnncctatccanntaaggtggnntttttttttttttttttttttttttttttt

SEQ ID NO: 6020 - DNA, 84 bp, synthetic construct
  source 1..84: mol_type = other DNA
tttttttaagcagtggtatcaacgcagagtacnncctatccannggtaagctnntttttttttttttttttttttttttttttt

SEQ ID NO: 6021 - DNA, 84 bp, synthetic construct
  source 1..84: mol_type = other DNA
tttttttaagcagtggtatcaacgcagagtacnncctatccanntgtgtcganntttttttttttttttttttttttttttttt

SEQ ID NO: 6022 - DNA, 84 bp, synthetic construct
  source 1..84: mol_type = other DNA
tttttttaagcagtggtatcaacgcagagtacnncctatccanngagcatganntttttttttttttttttttttttttttttt

SEQ ID NO: 6023 - DNA, 84 bp, synthetic construct
  source 1..84: mol_type = other DNA
tttttttaagcagtggtatcaacgcagagtacnncctatccanntcgaagtcnntttttttttttttttttttttttttttttt

SEQ ID NO: 6024 - DNA, 84 bp, synthetic construct
  source 1..84: mol_type = other DNA
tttttttaagcagtggtatcaacgcagagtacnncctatccannggtgaacanntttttttttttttttttttttttttttttt

SEQ ID NO: 6025 - DNA, 84 bp, synthetic construct
  source 1..84: mol_type = other DNA
tttttttaagcagtggtatcaacgcagagtacnncctatccannacatgcacnntttttttttttttttttttttttttttttt

SEQ ID NO: 6026 - DNA, 84 bp, synthetic construct
  source 1..84: mol_type = other DNA
tttttttaagcagtggtatcaacgcagagtacnncctatccannccaacagtnntttttttttttttttttttttttttttttt

SEQ ID NO: 6027 - DNA, 84 bp, synthetic construct
  source 1..84: mol_type = other DNA
tttttttaagcagtggtatcaacgcagagtacnncctatccannagaacagcnntttttttttttttttttttttttttttttt

SEQ ID NO: 6028 - DNA, 84 bp, synthetic construct
  source 1..84: mol_type = other DNA
tttttttaagcagtggtatcaacgcagagtacnncctatccanngaacacgtnntttttttttttttttttttttttttttttt

SEQ ID NO: 6029 - DNA, 84 bp, synthetic construct
  source 1..84: mol_type = other DNA
tttttttaagcagtggtatcaacgcagagtacnncctatccannggtcttcanntttttttttttttttttttttttttttttt

SEQ ID NO: 6030 - DNA, 84 bp, synthetic construct
  source 1..84: mol_type = other DNA
tttttttaagcagtggtatcaacgcagagtacnncctatccannaggttcagnntttttttttttttttttttttttttttttt

SEQ ID NO: 6031 - DNA, 84 bp, synthetic construct
  source 1..84: mol_type = other DNA
tttttttaagcagtggtatcaacgcagagtacnncctatccannctagagcanntttttttttttttttttttttttttttttt

SEQ ID NO: 6032 - DNA, 84 bp, synthetic construct
  source 1..84: mol_type = other DNA
tttttttaagcagtggtatcaacgcagagtacnncctatccanncttctagcnntttttttttttttttttttttttttttttt

SEQ ID NO: 6033 - DNA, 84 bp, synthetic construct
  source 1..84: mol_type = other DNA
tttttttaagcagtggtatcaacgcagagtacnncctatccanngagtaacgnntttttttttttttttttttttttttttttt

SEQ ID NO: 6034 - DNA, 84 bp, synthetic construct
  source 1..84: mol_type = other DNA
tttttttaagcagtggtatcaacgcagagtacnncctatccannctaagaggnntttttttttttttttttttttttttttttt

SEQ ID NO: 6035 - DNA, 84 bp, synthetic construct
  source 1..84: mol_type = other DNA
tttttttaagcagtggtatcaacgcagagtacnncctatccannacgtgtagnntttttttttttttttttttttttttttttt

SEQ ID NO: 6036 - DNA, 84 bp, synthetic construct
  source 1..84: mol_type = other DNA
tttttttaagcagtggtatcaacgcagagtacnncctatccannactacaggnntttttttttttttttttttttttttttttt

SEQ ID NO: 6037 - DNA, 84 bp, synthetic construct
  source 1..84: mol_type = other DNA
tttttttaagcagtggtatcaacgcagagtacnncctatccanntacaggtcnntttttttttttttttttttttttttttttt

SEQ ID NO: 6038 - DNA, 84 bp, synthetic construct
  source 1..84: mol_type = other DNA
tttttttaagcagtggtatcaacgcagagtacnncctatccannctcacatgnntttttttttttttttttttttttttttttt

SEQ ID NO: 6039 - DNA, 84 bp, synthetic construct
  source 1..84: mol_type = other DNA
tttttttaagcagtggtatcaacgcagagtacnncctatccannactaggagnntttttttttttttttttttttttttttttt

SEQ ID NO: 6040 - DNA, 84 bp, synthetic construct
  source 1..84: mol_type = other DNA
tttttttaagcagtggtatcaacgcagagtacnncctatccannccatagganntttttttttttttttttttttttttttttt

SEQ ID NO: 6041 - DNA, 84 bp, synthetic construct
  source 1..84: mol_type = other DNA
tttttttaagcagtggtatcaacgcagagtacnncctatccannggagaatcnntttttttttttttttttttttttttttttt

SEQ ID NO: 6042 - DNA, 84 bp, synthetic construct
  source 1..84: mol_type = other DNA
tttttttaagcagtggtatcaacgcagagtacnncctatccanngccaagaanntttttttttttttttttttttttttttttt

SEQ ID NO: 6043 - DNA, 84 bp, synthetic construct
  source 1..84: mol_type = other DNA
tttttttaagcagtggtatcaacgcagagtacnncctatccannaaggcaagnntttttttttttttttttttttttttttttt

SEQ ID NO: 6044 - DNA, 84 bp, synthetic construct
  source 1..84: mol_type = other DNA
tttttttaagcagtggtatcaacgcagagtacnncctatccannaatgtcgcnntttttttttttttttttttttttttttttt

SEQ ID NO: 6045 - DNA, 84 bp, synthetic construct
  source 1..84: mol_type = other DNA
tttttttaagcagtggtatcaacgcagagtacnncctatccannatggaaccnntttttttttttttttttttttttttttttt

SEQ ID NO: 6046 - DNA, 84 bp, synthetic construct
  source 1..84: mol_type = other DNA
tttttttaagcagtggtatcaacgcagagtacnncctatccannagaggcatnntttttttttttttttttttttttttttttt

SEQ ID NO: 6047 - DNA, 84 bp, synthetic construct
  source 1..84: mol_type = other DNA
tttttttaagcagtggtatcaacgcagagtacnncctatccanntgcatagcnntttttttttttttttttttttttttttttt

SEQ ID NO: 6048 - DNA, 84 bp, synthetic construct
  source 1..84: mol_type = other DNA
tttttttaagcagtggtatcaacgcagagtacnncctatccannctaacgganntttttttttttttttttttttttttttttt

SEQ ID NO: 6049 - DNA, 84 bp, synthetic construct
  source 1..84: mol_type = other DNA
tttttttaagcagtggtatcaacgcagagtacnncctatccanntatcgaggnntttttttttttttttttttttttttttttt

SEQ ID NO: 6050 - DNA, 84 bp, synthetic construct
  source 1..84: mol_type = other DNA
tttttttaagcagtggtatcaacgcagagtacnncctatccanncatagcctnntttttttttttttttttttttttttttttt

SEQ ID NO: 6051 - DNA, 84 bp, synthetic construct
  source 1..84: mol_type = other DNA
tttttttaagcagtggtatcaacgcagagtacnncctatccannatcgagacnntttttttttttttttttttttttttttttt

SEQ ID NO: 6052 - DNA, 84 bp, synthetic construct
  source 1..84: mol_type = other DNA
tttttttaagcagtggtatcaacgcagagtacnncctatccannggaagagtnntttttttttttttttttttttttttttttt

SEQ ID NO: 6053 - DNA, 84 bp, synthetic construct
  source 1..84: mol_type = other DNA
tttttttaagcagtggtatcaacgcagagtacnncctatccannccaagtagnntttttttttttttttttttttttttttttt

SEQ ID NO: 6054 - DNA, 84 bp, synthetic construct
  source 1..84: mol_type = other DNA
tttttttaagcagtggtatcaacgcagagtacnncctatccannctgaacagnntttttttttttttttttttttttttttttt

SEQ ID NO: 6055 - DNA, 84 bp, synthetic construct
  source 1..84: mol_type = other DNA
tttttttaagcagtggtatcaacgcagagtacnncctatccanngtaggttcnntttttttttttttttttttttttttttttt

SEQ ID NO: 6056 - DNA, 84 bp, synthetic construct
  source 1..84: mol_type = other DNA
tttttttaagcagtggtatcaacgcagagtacnncctatccanngtatggacnntttttttttttttttttttttttttttttt

SEQ ID NO: 6057 - DNA, 84 bp, synthetic construct
  source 1..84: mol_type = other DNA
tttttttaagcagtggtatcaacgcagagtacnncctatccanntcgcaacanntttttttttttttttttttttttttttttt

SEQ ID NO: 6058 - DNA, 84 bp, synthetic construct
  source 1..84: mol_type = other DNA
tttttttaagcagtggtatcaacgcagagtacnncctatccannccgctaatnntttttttttttttttttttttttttttttt

SEQ ID NO: 6059 - DNA, 84 bp, synthetic construct
  source 1..84: mol_type = other DNA
tttttttaagcagtggtatcaacgcagagtacnncctatccanngattcgcanntttttttttttttttttttttttttttttt

SEQ ID NO: 6060 - DNA, 84 bp, synthetic construct
  source 1..84: mol_type = other DNA
tttttttaagcagtggtatcaacgcagagtacnncctatccanncgatggaanntttttttttttttttttttttttttttttt

SEQ ID NO: 6061 - DNA, 84 bp, synthetic construct
  source 1..84: mol_type = other DNA
tttttttaagcagtggtatcaacgcagagtacnncctatccannagcaagganntttttttttttttttttttttttttttttt

SEQ ID NO: 6062 - DNA, 84 bp, synthetic construct
  source 1..84: mol_type = other DNA
tttttttaagcagtggtatcaacgcagagtacnncctatccanncgtagcaanntttttttttttttttttttttttttttttt

SEQ ID NO: 6063 - DNA, 84 bp, synthetic construct
  source 1..84: mol_type = other DNA
tttttttaagcagtggtatcaacgcagagtacnncctatccanntggcagtanntttttttttttttttttttttttttttttt

SEQ ID NO: 6064 - DNA, 84 bp, synthetic construct
  source 1..84: mol_type = other DNA
tttttttaagcagtggtatcaacgcagagtacnncctatccanncggtagttnntttttttttttttttttttttttttttttt

SEQ ID NO: 6065 - DNA, 84 bp, synthetic construct
  source 1..84: mol_type = other DNA
tttttttaagcagtggtatcaacgcagagtacnncctatccanntgacttcgnntttttttttttttttttttttttttttttt

SEQ ID NO: 6066 - DNA, 84 bp, synthetic construct
  source 1..84: mol_type = other DNA
tttttttaagcagtggtatcaacgcagagtacnncctatccanngagtgcaanntttttttttttttttttttttttttttttt

SEQ ID NO: 6067 - DNA, 84 bp, synthetic construct
  source 1..84: mol_type = other DNA
tttttttaagcagtggtatcaacgcagagtacnncctatccannacggtaacnntttttttttttttttttttttttttttttt

SEQ ID NO: 6068 - DNA, 84 bp, synthetic construct
  source 1..84: mol_type = other DNA
tttttttaagcagtggtatcaacgcagagtacnncctatccannaagtggtgnntttttttttttttttttttttttttttttt

SEQ ID NO: 6069 - DNA, 84 bp, synthetic construct
  source 1..84: mol_type = other DNA
tttttttaagcagtggtatcaacgcagagtacnncctatccannggagacaanntttttttttttttttttttttttttttttt

SEQ ID NO: 6070 - DNA, 84 bp, synthetic construct
  source 1..84: mol_type = other DNA
tttttttaagcagtggtatcaacgcagagtacnncctatccanntcaaggacnntttttttttttttttttttttttttttttt

SEQ ID NO: 6071 - DNA, 84 bp, synthetic construct
  source 1..84: mol_type = other DNA
tttttttaagcagtggtatcaacgcagagtacnncctatccannaagagagcnntttttttttttttttttttttttttttttt

SEQ ID NO: 6072 - DNA, 84 bp, synthetic construct
  source 1..84: mol_type = other DNA
tttttttaagcagtggtatcaacgcagagtacnncctatccanncgagagatnntttttttttttttttttttttttttttttt

SEQ ID NO: 6073 - DNA, 84 bp, synthetic construct
  source 1..84: mol_type = other DNA
tttttttaagcagtggtatcaacgcagagtacnncctatccannacagatggnntttttttttttttttttttttttttttttt

SEQ ID NO: 6074 - DNA, 84 bp, synthetic construct
  source 1..84: mol_type = other DNA
tttttttaagcagtggtatcaacgcagagtacnncctatccannaggagtcanntttttttttttttttttttttttttttttt

SEQ ID NO: 6075 - DNA, 84 bp, synthetic construct
  source 1..84: mol_type = other DNA
tttttttaagcagtggtatcaacgcagagtacnncctatccanncgtgttacnntttttttttttttttttttttttttttttt

SEQ ID NO: 6076 - DNA, 84 bp, synthetic construct
  source 1..84: mol_type = other DNA
tttttttaagcagtggtatcaacgcagagtacnncctatccanntagtgtgcnntttttttttttttttttttttttttttttt

SEQ ID NO: 6077 - DNA, 84 bp, synthetic construct
  source 1..84: mol_type = other DNA
tttttttaagcagtggtatcaacgcagagtacnncctatccannctcatgacnntttttttttttttttttttttttttttttt

SEQ ID NO: 6078 - DNA, 84 bp, synthetic construct
  source 1..84: mol_type = other DNA
tttttttaagcagtggtatcaacgcagagtacnncctatccanngtatccagnntttttttttttttttttttttttttttttt

SEQ ID NO: 6079 - DNA, 84 bp, synthetic construct
  source 1..84: mol_type = other DNA
tttttttaagcagtggtatcaacgcagagtacnncctatccannacgcctatnntttttttttttttttttttttttttttttt

SEQ ID NO: 6080 - DNA, 84 bp, synthetic construct
  source 1..84: mol_type = other DNA
tttttttaagcagtggtatcaacgcagagtacnncctatccannaacgacctnntttttttttttttttttttttttttttttt

SEQ ID NO: 6081 - DNA, 84 bp, synthetic construct
  source 1..84: mol_type = other DNA
tttttttaagcagtggtatcaacgcagagtacnncctatccannatcaggctnntttttttttttttttttttttttttttttt

SEQ ID NO: 6082 - DNA, 84 bp, synthetic construct
  source 1..84: mol_type = other DNA
tttttttaagcagtggtatcaacgcagagtacnncctatccanncaagttcgnntttttttttttttttttttttttttttttt

SEQ ID NO: 6083 - DNA, 84 bp, synthetic construct
  source 1..84: mol_type = other DNA
tttttttaagcagtggtatcaacgcagagtacnncctatccanntagccaganntttttttttttttttttttttttttttttt

SEQ ID NO: 6084 - DNA, 84 bp, synthetic construct
  source 1..84: mol_type = other DNA
tttttttaagcagtggtatcaacgcagagtacnncctatccanncaatcacgnntttttttttttttttttttttttttttttt

SEQ ID NO: 6085 - DNA, 84 bp, synthetic construct
  source 1..84: mol_type = other DNA
tttttttaagcagtggtatcaacgcagagtacnncctatccanngcaacaagnntttttttttttttttttttttttttttttt

SEQ ID NO: 6086 - DNA, 84 bp, synthetic construct
  source 1..84: mol_type = other DNA
tttttttaagcagtggtatcaacgcagagtacnncctatccanncacgacaanntttttttttttttttttttttttttttttt

SEQ ID NO: 6087 - DNA, 84 bp, synthetic construct
  source 1..84: mol_type = other DNA
tttttttaagcagtggtatcaacgcagagtacnncctatccanntacggaganntttttttttttttttttttttttttttttt

SEQ ID NO: 6088 - DNA, 84 bp, synthetic construct
  source 1..84: mol_type = other DNA
tttttttaagcagtggtatcaacgcagagtacnncctatccanncgacaaganntttttttttttttttttttttttttttttt

SEQ ID NO: 6089 - DNA, 84 bp, synthetic construct
  source 1..84: mol_type = other DNA
tttttttaagcagtggtatcaacgcagagtacnncctatccanncgaagtganntttttttttttttttttttttttttttttt

SEQ ID NO: 6090 - DNA, 84 bp, synthetic construct
  source 1..84: mol_type = other DNA
tttttttaagcagtggtatcaacgcagagtacnncctatccannagctggtanntttttttttttttttttttttttttttttt

SEQ ID NO: 6091 - DNA, 84 bp, synthetic construct
  source 1..84: mol_type = other DNA
tttttttaagcagtggtatcaacgcagagtacnncctatccannaactaggcnntttttttttttttttttttttttttttttt

SEQ ID NO: 6092 - DNA, 84 bp, synthetic construct
  source 1..84: mol_type = other DNA
tttttttaagcagtggtatcaacgcagagtacnncctatccanncagcaagtnntttttttttttttttttttttttttttttt

SEQ ID NO: 6093 - DNA, 84 bp, synthetic construct
  source 1..84: mol_type = other DNA
tttttttaagcagtggtatcaacgcagagtacnncctatccannacgaggtanntttttttttttttttttttttttttttttt

SEQ ID NO: 6094 - DNA, 84 bp, synthetic construct
  source 1..84: mol_type = other DNA
tttttttaagcagtggtatcaacgcagagtacnncctatccanncatcttccnntttttttttttttttttttttttttttttt

SEQ ID NO: 6095 - DNA, 84 bp, synthetic construct
  source 1..84: mol_type = other DNA
tttttttaagcagtggtatcaacgcagagtacnncctatccanncctgaatcnntttttttttttttttttttttttttttttt

SEQ ID NO: 6096 - DNA, 84 bp, synthetic construct
  source 1..84: mol_type = other DNA
tttttttaagcagtggtatcaacgcagagtacnncctatccanntgcagactnntttttttttttttttttttttttttttttt

SEQ ID NO: 6097 - DNA, 84 bp, synthetic construct
  source 1..84: mol_type = other DNA
tttttttaagcagtggtatcaacgcagagtacnncctatccannagatgtggnntttttttttttttttttttttttttttttt

SEQ ID NO: 6098 - DNA, 84 bp, synthetic construct
  source 1..84: mol_type = other DNA
tttttttaagcagtggtatcaacgcagagtacnncctatccannagttcgacnntttttttttttttttttttttttttttttt

SEQ ID NO: 6099 - DNA, 84 bp, synthetic construct
  source 1..84: mol_type = other DNA
tttttttaagcagtggtatcaacgcagagtacnncctatccannacaacctcnntttttttttttttttttttttttttttttt

SEQ ID NO: 6100 - DNA, 84 bp, synthetic construct
  source 1..84: mol_type = other DNA
tttttttaagcagtggtatcaacgcagagtacnncctatccanncatggtagnntttttttttttttttttttttttttttttt

SEQ ID NO: 6101 - DNA, 84 bp, synthetic construct
  source 1..84: mol_type = other DNA
tttttttaagcagtggtatcaacgcagagtacnncctatccanncgtatctcnntttttttttttttttttttttttttttttt

SEQ ID NO: 6102 - DNA, 84 bp, synthetic construct
  source 1..84: mol_type = other DNA
tttttttaagcagtggtatcaacgcagagtacnncctatccanncctagttcnntttttttttttttttttttttttttttttt

SEQ ID NO: 6103 - DNA, 84 bp, synthetic construct
  source 1..84: mol_type = other DNA
tttttttaagcagtggtatcaacgcagagtacnncctatccanncaagagtcnntttttttttttttttttttttttttttttt

SEQ ID NO: 6104 - DNA, 84 bp, synthetic construct
  source 1..84: mol_type = other DNA
tttttttaagcagtggtatcaacgcagagtacnncttggacannaatcggcanntttttttttttttttttttttttttttttt

SEQ ID NO: 6105 - DNA, 84 bp, synthetic construct
  source 1..84: mol_type = other DNA
tttttttaagcagtggtatcaacgcagagtacnncttggacanntacggcatnntttttttttttttttttttttttttttttt

SEQ ID NO: 6106 - DNA, 84 bp, synthetic construct
  source 1..84: mol_type = other DNA
tttttttaagcagtggtatcaacgcagagtacnncttggacannttggatcgnntttttttttttttttttttttttttttttt

SEQ ID NO: 6107 - DNA, 84 bp, synthetic construct
  source 1..84: mol_type = other DNA
tttttttaagcagtggtatcaacgcagagtacnncttggacanntggaacganntttttttttttttttttttttttttttttt

SEQ ID NO: 6108 - DNA, 84 bp, synthetic construct
  source 1..84: mol_type = other DNA
tttttttaagcagtggtatcaacgcagagtacnncttggacannggcaatcanntttttttttttttttttttttttttttttt

SEQ ID NO: 6109 - DNA, 84 bp, synthetic construct
  source 1..84: mol_type = other DNA
tttttttaagcagtggtatcaacgcagagtacnncttggacanngaatccganntttttttttttttttttttttttttttttt

SEQ ID NO: 6110 - DNA, 84 bp, synthetic construct
  source 1..84: mol_type = other DNA
tttttttaagcagtggtatcaacgcagagtacnncttggacannttacggtgnntttttttttttttttttttttttttttttt

SEQ ID NO: 6111 - DNA, 84 bp, synthetic construct
  source 1..84: mol_type = other DNA
tttttttaagcagtggtatcaacgcagagtacnncttggacanncatatcggnntttttttttttttttttttttttttttttt

SEQ ID NO: 6112 - DNA, 84 bp, synthetic construct
  source 1..84: mol_type = other DNA
tttttttaagcagtggtatcaacgcagagtacnncttggacanncttcggtanntttttttttttttttttttttttttttttt

SEQ ID NO: 6113 - DNA, 84 bp, synthetic construct
  source 1..84: mol_type = other DNA
tttttttaagcagtggtatcaacgcagagtacnncttggacanntcctaacgnntttttttttttttttttttttttttttttt

SEQ ID NO: 6114 - DNA, 84 bp, synthetic construct
  source 1..84: mol_type = other DNA
tttttttaagcagtggtatcaacgcagagtacnncttggacanngtaagccanntttttttttttttttttttttttttttttt

SEQ ID NO: 6115 - DNA, 84 bp, synthetic construct
  source 1..84: mol_type = other DNA
tttttttaagcagtggtatcaacgcagagtacnncttggacanntaaggtggnntttttttttttttttttttttttttttttt

SEQ ID NO: 6116 - DNA, 84 bp, synthetic construct
  source 1..84: mol_type = other DNA
tttttttaagcagtggtatcaacgcagagtacnncttggacannggtaagctnntttttttttttttttttttttttttttttt

SEQ ID NO: 6117 - DNA, 84 bp, synthetic construct
  source 1..84: mol_type = other DNA
tttttttaagcagtggtatcaacgcagagtacnncttggacanntgtgtcganntttttttttttttttttttttttttttttt

SEQ ID NO: 6118 - DNA, 84 bp, synthetic construct
  source 1..84: mol_type = other DNA
tttttttaagcagtggtatcaacgcagagtacnncttggacanngagcatganntttttttttttttttttttttttttttttt

SEQ ID NO: 6119 - DNA, 84 bp, synthetic construct
  source 1..84: mol_type = other DNA
tttttttaagcagtggtatcaacgcagagtacnncttggacanntcgaagtcnntttttttttttttttttttttttttttttt

SEQ ID NO: 6120 - DNA, 84 bp, synthetic construct
  source 1..84: mol_type = other DNA
tttttttaagcagtggtatcaacgcagagtacnncttggacannggtgaacanntttttttttttttttttttttttttttttt

SEQ ID NO: 6121 - DNA, 84 bp, synthetic construct
  source 1..84: mol_type = other DNA
tttttttaagcagtggtatcaacgcagagtacnncttggacannacatgcacnntttttttttttttttttttttttttttttt

SEQ ID NO: 6122 - DNA, 84 bp, synthetic construct
  source 1..84: mol_type = other DNA
tttttttaagcagtggtatcaacgcagagtacnncttggacannccaacagtnntttttttttttttttttttttttttttttt

SEQ ID NO: 6123 - DNA, 84 bp, synthetic construct
  source 1..84: mol_type = other DNA
tttttttaagcagtggtatcaacgcagagtacnncttggacannagaacagcnntttttttttttttttttttttttttttttt

SEQ ID NO: 6124 - DNA, 84 bp, synthetic construct
  source 1..84: mol_type = other DNA
tttttttaagcagtggtatcaacgcagagtacnncttggacanngaacacgtnntttttttttttttttttttttttttttttt

SEQ ID NO: 6125 - DNA, 84 bp, synthetic construct
  source 1..84: mol_type = other DNA
tttttttaagcagtggtatcaacgcagagtacnncttggacannggtcttcanntttttttttttttttttttttttttttttt

SEQ ID NO: 6126 - DNA, 84 bp, synthetic construct
  source 1..84: mol_type = other DNA
tttttttaagcagtggtatcaacgcagagtacnncttggacannaggttcagnntttttttttttttttttttttttttttttt

SEQ ID NO: 6127 - DNA, 84 bp, synthetic construct
  source 1..84: mol_type = other DNA
tttttttaagcagtggtatcaacgcagagtacnncttggacannctagagcanntttttttttttttttttttttttttttttt

SEQ ID NO: 6128 - DNA, 84 bp, synthetic construct
  source 1..84: mol_type = other DNA
tttttttaagcagtggtatcaacgcagagtacnncttggacanncttctagcnntttttttttttttttttttttttttttttt

SEQ ID NO: 6129 - DNA, 84 bp, synthetic construct
  source 1..84: mol_type = other DNA
tttttttaagcagtggtatcaacgcagagtacnncttggacanngagtaacgnntttttttttttttttttttttttttttttt

SEQ ID NO: 6130 - DNA, 84 bp, synthetic construct
  source 1..84: mol_type = other DNA
tttttttaagcagtggtatcaacgcagagtacnncttggacannctaagaggnntttttttttttttttttttttttttttttt

SEQ ID NO: 6131 - DNA, 84 bp, synthetic construct
  source 1..84: mol_type = other DNA
tttttttaagcagtggtatcaacgcagagtacnncttggacannacgtgtagnntttttttttttttttttttttttttttttt

SEQ ID NO: 6132 - DNA, 84 bp, synthetic construct
  source 1..84: mol_type = other DNA
tttttttaagcagtggtatcaacgcagagtacnncttggacannactacaggnntttttttttttttttttttttttttttttt

SEQ ID NO: 6133 - DNA, 84 bp, synthetic construct
  source 1..84: mol_type = other DNA
tttttttaagcagtggtatcaacgcagagtacnncttggacanntacaggtcnntttttttttttttttttttttttttttttt

SEQ ID NO: 6134 - DNA, 84 bp, synthetic construct
  source 1..84: mol_type = other DNA
tttttttaagcagtggtatcaacgcagagtacnncttggacannctcacatgnntttttttttttttttttttttttttttttt

SEQ ID NO: 6135 - DNA, 84 bp, synthetic construct
  source 1..84: mol_type = other DNA
tttttttaagcagtggtatcaacgcagagtacnncttggacannactaggagnntttttttttttttttttttttttttttttt

SEQ ID NO: 6136 - DNA, 84 bp, synthetic construct
  source 1..84: mol_type = other DNA
tttttttaagcagtggtatcaacgcagagtacnncttggacannccatagganntttttttttttttttttttttttttttttt

SEQ ID NO: 6137 - DNA, 84 bp, synthetic construct
  source 1..84: mol_type = other DNA
tttttttaagcagtggtatcaacgcagagtacnncttggacannggagaatcnntttttttttttttttttttttttttttttt

SEQ ID NO: 6138 - DNA, 84 bp, synthetic construct
  source 1..84: mol_type = other DNA
tttttttaagcagtggtatcaacgcagagtacnncttggacanngccaagaanntttttttttttttttttttttttttttttt

SEQ ID NO: 6139 - DNA, 84 bp, synthetic construct
  source 1..84: mol_type = other DNA
tttttttaagcagtggtatcaacgcagagtacnncttggacannaaggcaagnntttttttttttttttttttttttttttttt

SEQ ID NO: 6140 - DNA, 84 bp, synthetic construct
  source 1..84: mol_type = other DNA
tttttttaagcagtggtatcaacgcagagtacnncttggacannaatgtcgcnntttttttttttttttttttttttttttttt

SEQ ID NO: 6141 - DNA, 84 bp, synthetic construct
  source 1..84: mol_type = other DNA
tttttttaagcagtggtatcaacgcagagtacnncttggacannatggaaccnntttttttttttttttttttttttttttttt

SEQ ID NO: 6142 - DNA, 84 bp, synthetic construct
  source 1..84: mol_type = other DNA
tttttttaagcagtggtatcaacgcagagtacnncttggacannagaggcatnntttttttttttttttttttttttttttttt

SEQ ID NO: 6143 - DNA, 84 bp, synthetic construct
  source 1..84: mol_type = other DNA
tttttttaagcagtggtatcaacgcagagtacnncttggacanntgcatagcnntttttttttttttttttttttttttttttt

SEQ ID NO: 6144 - DNA, 84 bp, synthetic construct
  source 1..84: mol_type = other DNA
tttttttaagcagtggtatcaacgcagagtacnncttggacannctaacgganntttttttttttttttttttttttttttttt

SEQ ID NO: 6145 - DNA, 84 bp, synthetic construct
  source 1..84: mol_type = other DNA
tttttttaagcagtggtatcaacgcagagtacnncttggacanntatcgaggnntttttttttttttttttttttttttttttt

SEQ ID NO: 6146 - DNA, 84 bp, synthetic construct
  source 1..84: mol_type = other DNA
tttttttaagcagtggtatcaacgcagagtacnncttggacanncatagcctnntttttttttttttttttttttttttttttt

SEQ ID NO: 6147 - DNA, 84 bp, synthetic construct
  source 1..84: mol_type = other DNA
tttttttaagcagtggtatcaacgcagagtacnncttggacannatcgagacnntttttttttttttttttttttttttttttt

SEQ ID NO: 6148 - DNA, 84 bp, synthetic construct
  source 1..84: mol_type = other DNA
tttttttaagcagtggtatcaacgcagagtacnncttggacannggaagagtnntttttttttttttttttttttttttttttt

SEQ ID NO: 6149 - DNA, 84 bp, synthetic construct
  source 1..84: mol_type = other DNA
tttttttaagcagtggtatcaacgcagagtacnncttggacannccaagtagnntttttttttttttttttttttttttttttt

SEQ ID NO: 6150 - DNA, 84 bp, synthetic construct
  source 1..84: mol_type = other DNA
tttttttaagcagtggtatcaacgcagagtacnncttggacannctgaacagnntttttttttttttttttttttttttttttt

SEQ ID NO: 6151 - DNA, 84 bp, synthetic construct
  source 1..84: mol_type = other DNA
tttttttaagcagtggtatcaacgcagagtacnncttggacanngtaggttcnntttttttttttttttttttttttttttttt

SEQ ID NO: 6152 - DNA, 84 bp, synthetic construct
  source 1..84: mol_type = other DNA
tttttttaagcagtggtatcaacgcagagtacnncttggacanngtatggacnntttttttttttttttttttttttttttttt

SEQ ID NO: 6153 - DNA, 84 bp, synthetic construct
  source 1..84: mol_type = other DNA
tttttttaagcagtggtatcaacgcagagtacnncttggacanntcgcaacanntttttttttttttttttttttttttttttt

SEQ ID NO: 6154 - DNA, 84 bp, synthetic construct
  source 1..84: mol_type = other DNA
tttttttaagcagtggtatcaacgcagagtacnncttggacannccgctaatnntttttttttttttttttttttttttttttt

SEQ ID NO: 6155 - DNA, 84 bp, synthetic construct
  source 1..84: mol_type = other DNA
tttttttaagcagtggtatcaacgcagagtacnncttggacanngattcgcanntttttttttttttttttttttttttttttt

SEQ ID NO: 6156 - DNA, 84 bp, synthetic construct
  source 1..84: mol_type = other DNA
tttttttaagcagtggtatcaacgcagagtacnncttggacanncgatggaanntttttttttttttttttttttttttttttt

SEQ ID NO: 6157 - DNA, 84 bp, synthetic construct
  source 1..84: mol_type = other DNA
tttttttaagcagtggtatcaacgcagagtacnncttggacannagcaagganntttttttttttttttttttttttttttttt

SEQ ID NO: 6158 - DNA, 84 bp, synthetic construct
  source 1..84: mol_type = other DNA
tttttttaagcagtggtatcaacgcagagtacnncttggacanncgtagcaanntttttttttttttttttttttttttttttt

SEQ ID NO: 6159 - DNA, 84 bp, synthetic construct
  source 1..84: mol_type = other DNA
tttttttaagcagtggtatcaacgcagagtacnncttggacanntggcagtanntttttttttttttttttttttttttttttt

SEQ ID NO: 6160 - DNA, 84 bp, synthetic construct
  source 1..84: mol_type = other DNA
tttttttaagcagtggtatcaacgcagagtacnncttggacanncggtagttnntttttttttttttttttttttttttttttt

SEQ ID NO: 6161 - DNA, 84 bp, synthetic construct
  source 1..84: mol_type = other DNA
tttttttaagcagtggtatcaacgcagagtacnncttggacanntgacttcgnntttttttttttttttttttttttttttttt

SEQ ID NO: 6162 - DNA, 84 bp, synthetic construct
  source 1..84: mol_type = other DNA
tttttttaagcagtggtatcaacgcagagtacnncttggacanngagtgcaanntttttttttttttttttttttttttttttt

SEQ ID NO: 6163 - DNA, 84 bp, synthetic construct
  source 1..84: mol_type = other DNA
tttttttaagcagtggtatcaacgcagagtacnncttggacannacggtaacnntttttttttttttttttttttttttttttt

SEQ ID NO: 6164 - DNA, 84 bp, synthetic construct
  source 1..84: mol_type = other DNA
tttttttaagcagtggtatcaacgcagagtacnncttggacannaagtggtgnntttttttttttttttttttttttttttttt

SEQ ID NO: 6165 - DNA, 84 bp, synthetic construct
  source 1..84: mol_type = other DNA
tttttttaagcagtggtatcaacgcagagtacnncttggacannggagacaanntttttttttttttttttttttttttttttt

SEQ ID NO: 6166 - DNA, 84 bp, synthetic construct
  source 1..84: mol_type = other DNA
tttttttaagcagtggtatcaacgcagagtacnncttggacanntcaaggacnntttttttttttttttttttttttttttttt

SEQ ID NO: 6167 - DNA, 84 bp, synthetic construct
  source 1..84: mol_type = other DNA
tttttttaagcagtggtatcaacgcagagtacnncttggacannaagagagcnntttttttttttttttttttttttttttttt

SEQ ID NO: 6168 - DNA, 84 bp, synthetic construct
  source 1..84: mol_type = other DNA
tttttttaagcagtggtatcaacgcagagtacnncttggacanncgagagatnntttttttttttttttttttttttttttttt

SEQ ID NO: 6169 - DNA, 84 bp, synthetic construct
  source 1..84: mol_type = other DNA
tttttttaagcagtggtatcaacgcagagtacnncttggacannacagatggnntttttttttttttttttttttttttttttt

SEQ ID NO: 6170 - DNA, 84 bp, synthetic construct
  source 1..84: mol_type = other DNA
tttttttaagcagtggtatcaacgcagagtacnncttggacannaggagtcanntttttttttttttttttttttttttttttt

SEQ ID NO: 6171 - DNA, 84 bp, synthetic construct
  source 1..84: mol_type = other DNA
tttttttaagcagtggtatcaacgcagagtacnncttggacanncgtgttacnntttttttttttttttttttttttttttttt

SEQ ID NO: 6172 - DNA, 84 bp, synthetic construct
  source 1..84: mol_type = other DNA
tttttttaagcagtggtatcaacgcagagtacnncttggacanntagtgtgcnntttttttttttttttttttttttttttttt

SEQ ID NO: 6173 - DNA, 84 bp, synthetic construct
  source 1..84: mol_type = other DNA
tttttttaagcagtggtatcaacgcagagtacnncttggacannctcatgacnntttttttttttttttttttttttttttttt

SEQ ID NO: 6174 - DNA, 84 bp, synthetic construct
  source 1..84: mol_type = other DNA
tttttttaagcagtggtatcaacgcagagtacnncttggacanngtatccagnntttttttttttttttttttttttttttttt

SEQ ID NO: 6175 - DNA, 84 bp, synthetic construct
  source 1..84: mol_type = other DNA
tttttttaagcagtggtatcaacgcagagtacnncttggacannacgcctatnntttttttttttttttttttttttttttttt

SEQ ID NO: 6176 - DNA, 84 bp, synthetic construct
  source 1..84: mol_type = other DNA
tttttttaagcagtggtatcaacgcagagtacnncttggacannaacgacctnntttttttttttttttttttttttttttttt

SEQ ID NO: 6177 - DNA, 84 bp, synthetic construct
  source 1..84: mol_type = other DNA
tttttttaagcagtggtatcaacgcagagtacnncttggacannatcaggctnntttttttttttttttttttttttttttttt

SEQ ID NO: 6178 - DNA, 84 bp, synthetic construct
  source 1..84: mol_type = other DNA
tttttttaagcagtggtatcaacgcagagtacnncttggacanncaagttcgnntttttttttttttttttttttttttttttt

SEQ ID NO: 6179 - DNA, 84 bp, synthetic construct
  source 1..84: mol_type = other DNA
tttttttaagcagtggtatcaacgcagagtacnncttggacanntagccaganntttttttttttttttttttttttttttttt

SEQ ID NO: 6180 - DNA, 84 bp, synthetic construct
  source 1..84: mol_type = other DNA
tttttttaagcagtggtatcaacgcagagtacnncttggacanncaatcacgnntttttttttttttttttttttttttttttt

SEQ ID NO: 6181 - DNA, 84 bp, synthetic construct
  source 1..84: mol_type = other DNA
tttttttaagcagtggtatcaacgcagagtacnncttggacanngcaacaagnntttttttttttttttttttttttttttttt

SEQ ID NO: 6182 - DNA, 84 bp, synthetic construct
  source 1..84: mol_type = other DNA
tttttttaagcagtggtatcaacgcagagtacnncttggacanncacgacaanntttttttttttttttttttttttttttttt

SEQ ID NO: 6183 - DNA, 84 bp, synthetic construct
  source 1..84: mol_type = other DNA
tttttttaagcagtggtatcaacgcagagtacnncttggacanntacggaganntttttttttttttttttttttttttttttt

SEQ ID NO: 6184 - DNA, 84 bp, synthetic construct
  source 1..84: mol_type = other DNA
tttttttaagcagtggtatcaacgcagagtacnncttggacanncgacaaganntttttttttttttttttttttttttttttt

SEQ ID NO: 6185 - DNA, 84 bp, synthetic construct
  source 1..84: mol_type = other DNA
tttttttaagcagtggtatcaacgcagagtacnncttggacanncgaagtganntttttttttttttttttttttttttttttt

SEQ ID NO: 6186 - DNA, 84 bp, synthetic construct
  source 1..84: mol_type = other DNA
tttttttaagcagtggtatcaacgcagagtacnncttggacannagctggtanntttttttttttttttttttttttttttttt

SEQ ID NO: 6187 - DNA, 84 bp, synthetic construct
  source 1..84: mol_type = other DNA
tttttttaagcagtggtatcaacgcagagtacnncttggacannaactaggcnntttttttttttttttttttttttttttttt

SEQ ID NO: 6188 - DNA, 84 bp, synthetic construct
  source 1..84: mol_type = other DNA
tttttttaagcagtggtatcaacgcagagtacnncttggacanncagcaagtnntttttttttttttttttttttttttttttt

SEQ ID NO: 6189 - DNA, 84 bp, synthetic construct
  source 1..84: mol_type = other DNA
tttttttaagcagtggtatcaacgcagagtacnncttggacannacgaggtanntttttttttttttttttttttttttttttt

SEQ ID NO: 6190 - DNA, 84 bp, synthetic construct
  source 1..84: mol_type = other DNA
tttttttaagcagtggtatcaacgcagagtacnncttggacanncatcttccnntttttttttttttttttttttttttttttt

SEQ ID NO: 6191 - DNA, 84 bp, synthetic construct
  source 1..84: mol_type = other DNA
tttttttaagcagtggtatcaacgcagagtacnncttggacanncctgaatcnntttttttttttttttttttttttttttttt

SEQ ID NO: 6192 - DNA, 84 bp, synthetic construct
  source 1..84: mol_type = other DNA
tttttttaagcagtggtatcaacgcagagtacnncttggacanntgcagactnntttttttttttttttttttttttttttttt

SEQ ID NO: 6193 - DNA, 84 bp, synthetic construct
  source 1..84: mol_type = other DNA
tttttttaagcagtggtatcaacgcagagtacnncttggacannagatgtggnntttttttttttttttttttttttttttttt

SEQ ID NO: 6194 - DNA, 84 bp, synthetic construct
  source 1..84: mol_type = other DNA
tttttttaagcagtggtatcaacgcagagtacnncttggacannagttcgacnntttttttttttttttttttttttttttttt

SEQ ID NO: 6195 - DNA, 84 bp, synthetic construct
  source 1..84: mol_type = other DNA
tttttttaagcagtggtatcaacgcagagtacnncttggacannacaacctcnntttttttttttttttttttttttttttttt

SEQ ID NO: 6196 - DNA, 84 bp, synthetic construct
  source 1..84: mol_type = other DNA
tttttttaagcagtggtatcaacgcagagtacnncttggacanncatggtagnntttttttttttttttttttttttttttttt

SEQ ID NO: 6197 - DNA, 84 bp, synthetic construct
  source 1..84: mol_type = other DNA
tttttttaagcagtggtatcaacgcagagtacnncttggacanncgtatctcnntttttttttttttttttttttttttttttt

SEQ ID NO: 6198 - DNA, 84 bp, synthetic construct
  source 1..84: mol_type = other DNA
tttttttaagcagtggtatcaacgcagagtacnncttggacanncctagttcnntttttttttttttttttttttttttttttt

SEQ ID NO: 6199 - DNA, 84 bp, synthetic construct
  source 1..84: mol_type = other DNA
tttttttaagcagtggtatcaacgcagagtacnncttggacanncaagagtcnntttttttttttttttttttttttttttttt

SEQ ID NO: 6200 - DNA, 84 bp, synthetic construct
  source 1..84: mol_type = other DNA
tttttttaagcagtggtatcaacgcagagtacnntggtcaagnnaatcggcanntttttttttttttttttttttttttttttt

SEQ ID NO: 6201 - DNA, 84 bp, synthetic construct
  source 1..84: mol_type = other DNA
tttttttaagcagtggtatcaacgcagagtacnntggtcaagnntacggcatnntttttttttttttttttttttttttttttt

SEQ ID NO: 6202 - DNA, 84 bp, synthetic construct
  source 1..84: mol_type = other DNA
tttttttaagcagtggtatcaacgcagagtacnntggtcaagnnttggatcgnntttttttttttttttttttttttttttttt

SEQ ID NO: 6203 - DNA, 84 bp, synthetic construct
  source 1..84: mol_type = other DNA
tttttttaagcagtggtatcaacgcagagtacnntggtcaagnntggaacganntttttttttttttttttttttttttttttt

SEQ ID NO: 6204 - DNA, 84 bp, synthetic construct
  source 1..84: mol_type = other DNA
tttttttaagcagtggtatcaacgcagagtacnntggtcaagnnggcaatcanntttttttttttttttttttttttttttttt

SEQ ID NO: 6205 - DNA, 84 bp, synthetic construct
  source 1..84: mol_type = other DNA
tttttttaagcagtggtatcaacgcagagtacnntggtcaagnngaatccganntttttttttttttttttttttttttttttt

SEQ ID NO: 6206 - DNA, 84 bp, synthetic construct
  source 1..84: mol_type = other DNA
tttttttaagcagtggtatcaacgcagagtacnntggtcaagnnttacggtgnntttttttttttttttttttttttttttttt

SEQ ID NO: 6207 - DNA, 84 bp, synthetic construct
  source 1..84: mol_type = other DNA
tttttttaagcagtggtatcaacgcagagtacnntggtcaagnncatatcggnntttttttttttttttttttttttttttttt

SEQ ID NO: 6208 - DNA, 84 bp, synthetic construct
  source 1..84: mol_type = other DNA
tttttttaagcagtggtatcaacgcagagtacnntggtcaagnncttcggtanntttttttttttttttttttttttttttttt

SEQ ID NO: 6209 - DNA, 84 bp, synthetic construct
  source 1..84: mol_type = other DNA
tttttttaagcagtggtatcaacgcagagtacnntggtcaagnntcctaacgnntttttttttttttttttttttttttttttt

SEQ ID NO: 6210 - DNA, 84 bp, synthetic construct
  source 1..84: mol_type = other DNA
tttttttaagcagtggtatcaacgcagagtacnntggtcaagnngtaagccanntttttttttttttttttttttttttttttt

SEQ ID NO: 6211 - DNA, 84 bp, synthetic construct
  source 1..84: mol_type = other DNA
tttttttaagcagtggtatcaacgcagagtacnntggtcaagnntaaggtggnntttttttttttttttttttttttttttttt

SEQ ID NO: 6212 - DNA, 84 bp, synthetic construct
  source 1..84: mol_type = other DNA
tttttttaagcagtggtatcaacgcagagtacnntggtcaagnnggtaagctnntttttttttttttttttttttttttttttt

SEQ ID NO: 6213 - DNA, 84 bp, synthetic construct
  source 1..84: mol_type = other DNA
tttttttaagcagtggtatcaacgcagagtacnntggtcaagnntgtgtcganntttttttttttttttttttttttttttttt

SEQ ID NO: 6214 - DNA, 84 bp, synthetic construct
  source 1..84: mol_type = other DNA
tttttttaagcagtggtatcaacgcagagtacnntggtcaagnngagcatganntttttttttttttttttttttttttttttt

SEQ ID NO: 6215 - DNA, 84 bp, synthetic construct
  source 1..84: mol_type = other DNA
tttttttaagcagtggtatcaacgcagagtacnntggtcaagnntcgaagtcnntttttttttttttttttttttttttttttt

SEQ ID NO: 6216 - DNA, 84 bp, synthetic construct
  source 1..84: mol_type = other DNA
tttttttaagcagtggtatcaacgcagagtacnntggtcaagnnggtgaacanntttttttttttttttttttttttttttttt

SEQ ID NO: 6217 - DNA, 84 bp, synthetic construct
  source 1..84: mol_type = other DNA
tttttttaagcagtggtatcaacgcagagtacnntggtcaagnnacatgcacnntttttttttttttttttttttttttttttt

SEQ ID NO: 6218 - DNA, 84 bp, synthetic construct
  source 1..84: mol_type = other DNA
tttttttaagcagtggtatcaacgcagagtacnntggtcaagnnccaacagtnntttttttttttttttttttttttttttttt

SEQ ID NO: 6219 - DNA, 84 bp, synthetic construct
  source 1..84: mol_type = other DNA
tttttttaagcagtggtatcaacgcagagtacnntggtcaagnnagaacagcnntttttttttttttttttttttttttttttt

SEQ ID NO: 6220 - DNA, 84 bp, synthetic construct
  source 1..84: mol_type = other DNA
tttttttaagcagtggtatcaacgcagagtacnntggtcaagnngaacacgtnntttttttttttttttttttttttttttttt

SEQ ID NO: 6221 - DNA, 84 bp, synthetic construct
  source 1..84: mol_type = other DNA
tttttttaagcagtggtatcaacgcagagtacnntggtcaagnnggtcttcanntttttttttttttttttttttttttttttt

SEQ ID NO: 6222 - DNA, 84 bp, synthetic construct
  source 1..84: mol_type = other DNA
tttttttaagcagtggtatcaacgcagagtacnntggtcaagnnaggttcagnntttttttttttttttttttttttttttttt

SEQ ID NO: 6223 - DNA, 84 bp, synthetic construct
  source 1..84: mol_type = other DNA
tttttttaagcagtggtatcaacgcagagtacnntggtcaagnnctagagcanntttttttttttttttttttttttttttttt

SEQ ID NO: 6224 - DNA, 84 bp, synthetic construct
  source 1..84: mol_type = other DNA
tttttttaagcagtggtatcaacgcagagtacnntggtcaagnncttctagcnntttttttttttttttttttttttttttttt

SEQ ID NO: 6225 - DNA, 84 bp, synthetic construct
  source 1..84: mol_type = other DNA
tttttttaagcagtggtatcaacgcagagtacnntggtcaagnngagtaacgnntttttttttttttttttttttttttttttt

SEQ ID NO: 6226 - DNA, 84 bp, synthetic construct
  source 1..84: mol_type = other DNA
tttttttaagcagtggtatcaacgcagagtacnntggtcaagnnctaagaggnntttttttttttttttttttttttttttttt

SEQ ID NO: 6227 - DNA, 84 bp, synthetic construct
  source 1..84: mol_type = other DNA
tttttttaagcagtggtatcaacgcagagtacnntggtcaagnnacgtgtagnntttttttttttttttttttttttttttttt

SEQ ID NO: 6228 - DNA, 84 bp, synthetic construct
  source 1..84: mol_type = other DNA
tttttttaagcagtggtatcaacgcagagtacnntggtcaagnnactacaggnntttttttttttttttttttttttttttttt

SEQ ID NO: 6229 - DNA, 84 bp, synthetic construct
  source 1..84: mol_type = other DNA
tttttttaagcagtggtatcaacgcagagtacnntggtcaagnntacaggtcnntttttttttttttttttttttttttttttt

SEQ ID NO: 6230 - DNA, 84 bp, synthetic construct
  source 1..84: mol_type = other DNA
tttttttaagcagtggtatcaacgcagagtacnntggtcaagnnctcacatgnntttttttttttttttttttttttttttttt

SEQ ID NO: 6231 - DNA, 84 bp, synthetic construct
  source 1..84: mol_type = other DNA
tttttttaagcagtggtatcaacgcagagtacnntggtcaagnnactaggagnntttttttttttttttttttttttttttttt

SEQ ID NO: 6232 - DNA, 84 bp, synthetic construct
  source 1..84: mol_type = other DNA
tttttttaagcagtggtatcaacgcagagtacnntggtcaagnnccatagganntttttttttttttttttttttttttttttt

SEQ ID NO: 6233 - DNA, 84 bp, synthetic construct
  source 1..84: mol_type = other DNA
tttttttaagcagtggtatcaacgcagagtacnntggtcaagnnggagaatcnntttttttttttttttttttttttttttttt

SEQ ID NO: 6234 - DNA, 84 bp, synthetic construct
  source 1..84: mol_type = other DNA
tttttttaagcagtggtatcaacgcagagtacnntggtcaagnngccaagaanntttttttttttttttttttttttttttttt

SEQ ID NO: 6235 - DNA, 84 bp, synthetic construct
  source 1..84: mol_type = other DNA
tttttttaagcagtggtatcaacgcagagtacnntggtcaagnnaaggcaagnntttttttttttttttttttttttttttttt

SEQ ID NO: 6236 - DNA, 84 bp, synthetic construct
  source 1..84: mol_type = other DNA
tttttttaagcagtggtatcaacgcagagtacnntggtcaagnnaatgtcgcnntttttttttttttttttttttttttttttt

SEQ ID NO: 6237 - DNA, 84 bp, synthetic construct
  source 1..84: mol_type = other DNA
tttttttaagcagtggtatcaacgcagagtacnntggtcaagnnatggaaccnntttttttttttttttttttttttttttttt

SEQ ID NO: 6238 - DNA, 84 bp, synthetic construct
  source 1..84: mol_type = other DNA
tttttttaagcagtggtatcaacgcagagtacnntggtcaagnnagaggcatnntttttttttttttttttttttttttttttt

SEQ ID NO: 6239 - DNA, 84 bp, synthetic construct
  source 1..84: mol_type = other DNA
tttttttaagcagtggtatcaacgcagagtacnntggtcaagnntgcatagcnntttttttttttttttttttttttttttttt

SEQ ID NO: 6240 - DNA, 84 bp, synthetic construct
  source 1..84: mol_type = other DNA
tttttttaagcagtggtatcaacgcagagtacnntggtcaagnnctaacgganntttttttttttttttttttttttttttttt

SEQ ID NO: 6241 - DNA, 84 bp, synthetic construct
  source 1..84: mol_type = other DNA
tttttttaagcagtggtatcaacgcagagtacnntggtcaagnntatcgaggnntttttttttttttttttttttttttttttt

SEQ ID NO: 6242 - DNA, 84 bp, synthetic construct
  source 1..84: mol_type = other DNA
tttttttaagcagtggtatcaacgcagagtacnntggtcaagnncatagcctnntttttttttttttttttttttttttttttt

SEQ ID NO: 6243 - DNA, 84 bp, synthetic construct
  source 1..84: mol_type = other DNA
tttttttaagcagtggtatcaacgcagagtacnntggtcaagnnatcgagacnntttttttttttttttttttttttttttttt

SEQ ID NO: 6244 - DNA, 84 bp, synthetic construct
  source 1..84: mol_type = other DNA
tttttttaagcagtggtatcaacgcagagtacnntggtcaagnnggaagagtnntttttttttttttttttttttttttttttt

SEQ ID NO: 6245 - DNA, 84 bp, synthetic construct
  source 1..84: mol_type = other DNA
tttttttaagcagtggtatcaacgcagagtacnntggtcaagnnccaagtagnntttttttttttttttttttttttttttttt

SEQ ID NO: 6246 - DNA, 84 bp, synthetic construct
  source 1..84: mol_type = other DNA
tttttttaagcagtggtatcaacgcagagtacnntggtcaagnnctgaacagnntttttttttttttttttttttttttttttt

SEQ ID NO: 6247 - DNA, 84 bp, synthetic construct
  source 1..84: mol_type = other DNA
tttttttaagcagtggtatcaacgcagagtacnntggtcaagnngtaggttcnntttttttttttttttttttttttttttttt

SEQ ID NO: 6248 - DNA, 84 bp, synthetic construct
  source 1..84: mol_type = other DNA
tttttttaagcagtggtatcaacgcagagtacnntggtcaagnngtatggacnntttttttttttttttttttttttttttttt

SEQ ID NO: 6249 - DNA, 84 bp, synthetic construct
  source 1..84: mol_type = other DNA
tttttttaagcagtggtatcaacgcagagtacnntggtcaagnntcgcaacanntttttttttttttttttttttttttttttt

SEQ ID NO: 6250 - DNA, 84 bp, synthetic construct
  source 1..84: mol_type = other DNA
tttttttaagcagtggtatcaacgcagagtacnntggtcaagnnccgctaatnntttttttttttttttttttttttttttttt

SEQ ID NO: 6251 - DNA, 84 bp, synthetic construct
  source 1..84: mol_type = other DNA
tttttttaagcagtggtatcaacgcagagtacnntggtcaagnngattcgcanntttttttttttttttttttttttttttttt

SEQ ID NO: 6252 - DNA, 84 bp, synthetic construct
  source 1..84: mol_type = other DNA
tttttttaagcagtggtatcaacgcagagtacnntggtcaagnncgatggaanntttttttttttttttttttttttttttttt

SEQ ID NO: 6253 - DNA, 84 bp, synthetic construct
  source 1..84: mol_type = other DNA
tttttttaagcagtggtatcaacgcagagtacnntggtcaagnnagcaagganntttttttttttttttttttttttttttttt

SEQ ID NO: 6254 - DNA, 84 bp, synthetic construct
  source 1..84: mol_type = other DNA
tttttttaagcagtggtatcaacgcagagtacnntggtcaagnncgtagcaanntttttttttttttttttttttttttttttt

SEQ ID NO: 6255 - DNA, 84 bp, synthetic construct
  source 1..84: mol_type = other DNA
tttttttaagcagtggtatcaacgcagagtacnntggtcaagnntggcagtanntttttttttttttttttttttttttttttt

SEQ ID NO: 6256 - DNA, 84 bp, synthetic construct
  source 1..84: mol_type = other DNA
tttttttaagcagtggtatcaacgcagagtacnntggtcaagnncggtagttnntttttttttttttttttttttttttttttt

SEQ ID NO: 6257 - DNA, 84 bp, synthetic construct
  source 1..84: mol_type = other DNA
tttttttaagcagtggtatcaacgcagagtacnntggtcaagnntgacttcgnntttttttttttttttttttttttttttttt

SEQ ID NO: 6258 - DNA, 84 bp, synthetic construct
  source 1..84: mol_type = other DNA
tttttttaagcagtggtatcaacgcagagtacnntggtcaagnngagtgcaanntttttttttttttttttttttttttttttt

SEQ ID NO: 6259 - DNA, 84 bp, synthetic construct
  source 1..84: mol_type = other DNA
tttttttaagcagtggtatcaacgcagagtacnntggtcaagnnacggtaacnntttttttttttttttttttttttttttttt

SEQ ID NO: 6260 - DNA, 84 bp, synthetic construct
  source 1..84: mol_type = other DNA
tttttttaagcagtggtatcaacgcagagtacnntggtcaagnnaagtggtgnntttttttttttttttttttttttttttttt

SEQ ID NO: 6261 - DNA, 84 bp, synthetic construct
  source 1..84: mol_type = other DNA
tttttttaagcagtggtatcaacgcagagtacnntggtcaagnnggagacaanntttttttttttttttttttttttttttttt

SEQ ID NO: 6262 - DNA, 84 bp, synthetic construct
  source 1..84: mol_type = other DNA
tttttttaagcagtggtatcaacgcagagtacnntggtcaagnntcaaggacnntttttttttttttttttttttttttttttt

SEQ ID NO: 6263 - DNA, 84 bp, synthetic construct
  source 1..84: mol_type = other DNA
tttttttaagcagtggtatcaacgcagagtacnntggtcaagnnaagagagcnntttttttttttttttttttttttttttttt

SEQ ID NO: 6264 - DNA, 84 bp, synthetic construct
  source 1..84: mol_type = other DNA
tttttttaagcagtggtatcaacgcagagtacnntggtcaagnncgagagatnntttttttttttttttttttttttttttttt

SEQ ID NO: 6265 - DNA, 84 bp, synthetic construct
  source 1..84: mol_type = other DNA
tttttttaagcagtggtatcaacgcagagtacnntggtcaagnnacagatggnntttttttttttttttttttttttttttttt

SEQ ID NO: 6266 - DNA, 84 bp, synthetic construct
  source 1..84: mol_type = other DNA
tttttttaagcagtggtatcaacgcagagtacnntggtcaagnnaggagtcanntttttttttttttttttttttttttttttt

SEQ ID NO: 6267 - DNA, 84 bp, synthetic construct
  source 1..84: mol_type = other DNA
tttttttaagcagtggtatcaacgcagagtacnntggtcaagnncgtgttacnntttttttttttttttttttttttttttttt

SEQ ID NO: 6268 - DNA, 84 bp, synthetic construct
  source 1..84: mol_type = other DNA
tttttttaagcagtggtatcaacgcagagtacnntggtcaagnntagtgtgcnntttttttttttttttttttttttttttttt

SEQ ID NO: 6269 - DNA, 84 bp, synthetic construct
  source 1..84: mol_type = other DNA
tttttttaagcagtggtatcaacgcagagtacnntggtcaagnnctcatgacnntttttttttttttttttttttttttttttt

SEQ ID NO: 6270 - DNA, 84 bp, synthetic construct
  source 1..84: mol_type = other DNA
tttttttaagcagtggtatcaacgcagagtacnntggtcaagnngtatccagnntttttttttttttttttttttttttttttt

SEQ ID NO: 6271 - DNA, 84 bp, synthetic construct
  source 1..84: mol_type = other DNA
tttttttaagcagtggtatcaacgcagagtacnntggtcaagnnacgcctatnntttttttttttttttttttttttttttttt

SEQ ID NO: 6272 - DNA, 84 bp, synthetic construct
  source 1..84: mol_type = other DNA
tttttttaagcagtggtatcaacgcagagtacnntggtcaagnnaacgacctnntttttttttttttttttttttttttttttt

SEQ ID NO: 6273 - DNA, 84 bp, synthetic construct
  source 1..84: mol_type = other DNA
tttttttaagcagtggtatcaacgcagagtacnntggtcaagnnatcaggctnntttttttttttttttttttttttttttttt

SEQ ID NO: 6274 - DNA, 84 bp, synthetic construct
  source 1..84: mol_type = other DNA
tttttttaagcagtggtatcaacgcagagtacnntggtcaagnncaagttcgnntttttttttttttttttttttttttttttt

SEQ ID NO: 6275 - DNA, 84 bp, synthetic construct
  source 1..84: mol_type = other DNA
tttttttaagcagtggtatcaacgcagagtacnntggtcaagnntagccaganntttttttttttttttttttttttttttttt

SEQ ID NO: 6276 - DNA, 84 bp, synthetic construct
  source 1..84: mol_type = other DNA
tttttttaagcagtggtatcaacgcagagtacnntggtcaagnncaatcacgnntttttttttttttttttttttttttttttt

SEQ ID NO: 6277 - DNA, 84 bp, synthetic construct
  source 1..84: mol_type = other DNA
tttttttaagcagtggtatcaacgcagagtacnntggtcaagnngcaacaagnntttttttttttttttttttttttttttttt

SEQ ID NO: 6278 - DNA, 84 bp, synthetic construct
  source 1..84: mol_type = other DNA
tttttttaagcagtggtatcaacgcagagtacnntggtcaagnncacgacaanntttttttttttttttttttttttttttttt

SEQ ID NO: 6279 - DNA, 84 bp, synthetic construct
  source 1..84: mol_type = other DNA
tttttttaagcagtggtatcaacgcagagtacnntggtcaagnntacggaganntttttttttttttttttttttttttttttt

SEQ ID NO: 6280 - DNA, 84 bp, synthetic construct
  source 1..84: mol_type = other DNA
tttttttaagcagtggtatcaacgcagagtacnntggtcaagnncgacaaganntttttttttttttttttttttttttttttt

SEQ ID NO: 6281 - DNA, 84 bp, synthetic construct
  source 1..84: mol_type = other DNA
tttttttaagcagtggtatcaacgcagagtacnntggtcaagnncgaagtganntttttttttttttttttttttttttttttt

SEQ ID NO: 6282 - DNA, 84 bp, synthetic construct
  source 1..84: mol_type = other DNA
tttttttaagcagtggtatcaacgcagagtacnntggtcaagnnagctggtanntttttttttttttttttttttttttttttt

SEQ ID NO: 6283 - DNA, 84 bp, synthetic construct
  source 1..84: mol_type = other DNA
tttttttaagcagtggtatcaacgcagagtacnntggtcaagnnaactaggcnntttttttttttttttttttttttttttttt

SEQ ID NO: 6284 - DNA, 84 bp, synthetic construct
  source 1..84: mol_type = other DNA
tttttttaagcagtggtatcaacgcagagtacnntggtcaagnncagcaagtnntttttttttttttttttttttttttttttt

SEQ ID NO: 6285 - DNA, 84 bp, synthetic construct
  source 1..84: mol_type = other DNA
tttttttaagcagtggtatcaacgcagagtacnntggtcaagnnacgaggtanntttttttttttttttttttttttttttttt

SEQ ID NO: 6286 - DNA, 84 bp, synthetic construct
  source 1..84: mol_type = other DNA
tttttttaagcagtggtatcaacgcagagtacnntggtcaagnncatcttccnntttttttttttttttttttttttttttttt

SEQ ID NO: 6287 - DNA, 84 bp, synthetic construct
  source 1..84: mol_type = other DNA
tttttttaagcagtggtatcaacgcagagtacnntggtcaagnncctgaatcnntttttttttttttttttttttttttttttt

SEQ ID NO: 6288 - DNA, 84 bp, synthetic construct
  source 1..84: mol_type = other DNA
tttttttaagcagtggtatcaacgcagagtacnntggtcaagnntgcagactnntttttttttttttttttttttttttttttt

SEQ ID NO: 6289 - DNA, 84 bp, synthetic construct
  source 1..84: mol_type = other DNA
tttttttaagcagtggtatcaacgcagagtacnntggtcaagnnagatgtggnntttttttttttttttttttttttttttttt

SEQ ID NO: 6290 - DNA, 84 bp, synthetic construct
  source 1..84: mol_type = other DNA
tttttttaagcagtggtatcaacgcagagtacnntggtcaagnnagttcgacnntttttttttttttttttttttttttttttt

SEQ ID NO: 6291 - DNA, 84 bp, synthetic construct
  source 1..84: mol_type = other DNA
tttttttaagcagtggtatcaacgcagagtacnntggtcaagnnacaacctcnntttttttttttttttttttttttttttttt

SEQ ID NO: 6292 - DNA, 84 bp, synthetic construct
  source 1..84: mol_type = other DNA
tttttttaagcagtggtatcaacgcagagtacnntggtcaagnncatggtagnntttttttttttttttttttttttttttttt

SEQ ID NO: 6293 - DNA, 84 bp, synthetic construct
  source 1..84: mol_type = other DNA
tttttttaagcagtggtatcaacgcagagtacnntggtcaagnncgtatctcnntttttttttttttttttttttttttttttt

SEQ ID NO: 6294 - DNA, 84 bp, synthetic construct
  source 1..84: mol_type = other DNA
tttttttaagcagtggtatcaacgcagagtacnntggtcaagnncctagttcnntttttttttttttttttttttttttttttt

SEQ ID NO: 6295 - DNA, 84 bp, synthetic construct
  source 1..84: mol_type = other DNA
tttttttaagcagtggtatcaacgcagagtacnntggtcaagnncaagagtcnntttttttttttttttttttttttttttttt

SEQ ID NO: 6296 - DNA, 84 bp, synthetic construct
  source 1..84: mol_type = other DNA
tttttttaagcagtggtatcaacgcagagtacnngaatgagcnnaatcggcanntttttttttttttttttttttttttttttt

SEQ ID NO: 6297 - DNA, 84 bp, synthetic construct
  source 1..84: mol_type = other DNA
tttttttaagcagtggtatcaacgcagagtacnngaatgagcnntacggcatnntttttttttttttttttttttttttttttt

SEQ ID NO: 6298 - DNA, 84 bp, synthetic construct
  source 1..84: mol_type = other DNA
tttttttaagcagtggtatcaacgcagagtacnngaatgagcnnttggatcgnntttttttttttttttttttttttttttttt

SEQ ID NO: 6299 - DNA, 84 bp, synthetic construct
  source 1..84: mol_type = other DNA
tttttttaagcagtggtatcaacgcagagtacnngaatgagcnntggaacganntttttttttttttttttttttttttttttt

SEQ ID NO: 6300 - DNA, 84 bp, synthetic construct
  source 1..84: mol_type = other DNA
tttttttaagcagtggtatcaacgcagagtacnngaatgagcnnggcaatcanntttttttttttttttttttttttttttttt

SEQ ID NO: 6301 - DNA, 84 bp, synthetic construct
  source 1..84: mol_type = other DNA
tttttttaagcagtggtatcaacgcagagtacnngaatgagcnngaatccganntttttttttttttttttttttttttttttt

SEQ ID NO: 6302 - DNA, 84 bp, synthetic construct
  source 1..84: mol_type = other DNA
tttttttaagcagtggtatcaacgcagagtacnngaatgagcnnttacggtgnntttttttttttttttttttttttttttttt

SEQ ID NO: 6303 - DNA, 84 bp, synthetic construct
  source 1..84: mol_type = other DNA
tttttttaagcagtggtatcaacgcagagtacnngaatgagcnncatatcggnntttttttttttttttttttttttttttttt

SEQ ID NO: 6304 - DNA, 84 bp, synthetic construct
  source 1..84: mol_type = other DNA
tttttttaagcagtggtatcaacgcagagtacnngaatgagcnncttcggtanntttttttttttttttttttttttttttttt

SEQ ID NO: 6305 - DNA, 84 bp, synthetic construct
  source 1..84: mol_type = other DNA
tttttttaagcagtggtatcaacgcagagtacnngaatgagcnntcctaacgnntttttttttttttttttttttttttttttt

SEQ ID NO: 6306 - DNA, 84 bp, synthetic construct
  source 1..84: mol_type = other DNA
tttttttaagcagtggtatcaacgcagagtacnngaatgagcnngtaagccanntttttttttttttttttttttttttttttt

SEQ ID NO: 6307 - DNA, 84 bp, synthetic construct
  source 1..84: mol_type = other DNA
tttttttaagcagtggtatcaacgcagagtacnngaatgagcnntaaggtggnntttttttttttttttttttttttttttttt

SEQ ID NO: 6308 - DNA, 84 bp, synthetic construct
  source 1..84: mol_type = other DNA
tttttttaagcagtggtatcaacgcagagtacnngaatgagcnnggtaagctnntttttttttttttttttttttttttttttt

SEQ ID NO: 6309 - DNA, 84 bp, synthetic construct
  source 1..84: mol_type = other DNA
tttttttaagcagtggtatcaacgcagagtacnngaatgagcnntgtgtcganntttttttttttttttttttttttttttttt

SEQ ID NO: 6310 - DNA, 84 bp, synthetic construct
  source 1..84: mol_type = other DNA
tttttttaagcagtggtatcaacgcagagtacnngaatgagcnngagcatganntttttttttttttttttttttttttttttt

SEQ ID NO: 6311 - DNA, 84 bp, synthetic construct
  source 1..84: mol_type = other DNA
tttttttaagcagtggtatcaacgcagagtacnngaatgagcnntcgaagtcnntttttttttttttttttttttttttttttt

SEQ ID NO: 6312 - DNA, 84 bp, synthetic construct
  source 1..84: mol_type = other DNA
tttttttaagcagtggtatcaacgcagagtacnngaatgagcnnggtgaacanntttttttttttttttttttttttttttttt

SEQ ID NO: 6313 - DNA, 84 bp, synthetic construct
  source 1..84: mol_type = other DNA
tttttttaagcagtggtatcaacgcagagtacnngaatgagcnnacatgcacnntttttttttttttttttttttttttttttt

SEQ ID NO: 6314 - DNA, 84 bp, synthetic construct
  source 1..84: mol_type = other DNA
tttttttaagcagtggtatcaacgcagagtacnngaatgagcnnccaacagtnntttttttttttttttttttttttttttttt

SEQ ID NO: 6315 - DNA, 84 bp, synthetic construct
  source 1..84: mol_type = other DNA
tttttttaagcagtggtatcaacgcagagtacnngaatgagcnnagaacagcnntttttttttttttttttttttttttttttt

SEQ ID NO: 6316 - DNA, 84 bp, synthetic construct
  source 1..84: mol_type = other DNA
tttttttaagcagtggtatcaacgcagagtacnngaatgagcnngaacacgtnntttttttttttttttttttttttttttttt

SEQ ID NO: 6317 - DNA, 84 bp, synthetic construct
  source 1..84: mol_type = other DNA
tttttttaagcagtggtatcaacgcagagtacnngaatgagcnnggtcttcanntttttttttttttttttttttttttttttt

SEQ ID NO: 6318 - DNA, 84 bp, synthetic construct
  source 1..84: mol_type = other DNA
tttttttaagcagtggtatcaacgcagagtacnngaatgagcnnaggttcagnntttttttttttttttttttttttttttttt

SEQ ID NO: 6319 - DNA, 84 bp, synthetic construct
  source 1..84: mol_type = other DNA
tttttttaagcagtggtatcaacgcagagtacnngaatgagcnnctagagcanntttttttttttttttttttttttttttttt

SEQ ID NO: 6320 - DNA, 84 bp, synthetic construct
  source 1..84: mol_type = other DNA
tttttttaagcagtggtatcaacgcagagtacnngaatgagcnncttctagcnntttttttttttttttttttttttttttttt

SEQ ID NO: 6321 - DNA, 84 bp, synthetic construct
  source 1..84: mol_type = other DNA
tttttttaagcagtggtatcaacgcagagtacnngaatgagcnngagtaacgnntttttttttttttttttttttttttttttt

SEQ ID NO: 6322 - DNA, 84 bp, synthetic construct
  source 1..84: mol_type = other DNA
tttttttaagcagtggtatcaacgcagagtacnngaatgagcnnctaagaggnntttttttttttttttttttttttttttttt

SEQ ID NO: 6323 - DNA, 84 bp, synthetic construct
  source 1..84: mol_type = other DNA
tttttttaagcagtggtatcaacgcagagtacnngaatgagcnnacgtgtagnntttttttttttttttttttttttttttttt

SEQ ID NO: 6324 - DNA, 84 bp, synthetic construct
  source 1..84: mol_type = other DNA
tttttttaagcagtggtatcaacgcagagtacnngaatgagcnnactacaggnntttttttttttttttttttttttttttttt

SEQ ID NO: 6325 - DNA, 84 bp, synthetic construct
  source 1..84: mol_type = other DNA
tttttttaagcagtggtatcaacgcagagtacnngaatgagcnntacaggtcnntttttttttttttttttttttttttttttt

SEQ ID NO: 6326 - DNA, 84 bp, synthetic construct
  source 1..84: mol_type = other DNA
tttttttaagcagtggtatcaacgcagagtacnngaatgagcnnctcacatgnntttttttttttttttttttttttttttttt

SEQ ID NO: 6327 - DNA, 84 bp, synthetic construct
  source 1..84: mol_type = other DNA
tttttttaagcagtggtatcaacgcagagtacnngaatgagcnnactaggagnntttttttttttttttttttttttttttttt

SEQ ID NO: 6328 - DNA, 84 bp, synthetic construct
  source 1..84: mol_type = other DNA
tttttttaagcagtggtatcaacgcagagtacnngaatgagcnnccatagganntttttttttttttttttttttttttttttt

SEQ ID NO: 6329 - DNA, 84 bp, synthetic construct
  source 1..84: mol_type = other DNA
tttttttaagcagtggtatcaacgcagagtacnngaatgagcnnggagaatcnntttttttttttttttttttttttttttttt

SEQ ID NO: 6330 - DNA, 84 bp, synthetic construct
  source 1..84: mol_type = other DNA
tttttttaagcagtggtatcaacgcagagtacnngaatgagcnngccaagaanntttttttttttttttttttttttttttttt

SEQ ID NO: 6331 - DNA, 84 bp, synthetic construct
  source 1..84: mol_type = other DNA
tttttttaagcagtggtatcaacgcagagtacnngaatgagcnnaaggcaagnntttttttttttttttttttttttttttttt

SEQ ID NO: 6332 - DNA, 84 bp, synthetic construct
  source 1..84: mol_type = other DNA
tttttttaagcagtggtatcaacgcagagtacnngaatgagcnnaatgtcgcnntttttttttttttttttttttttttttttt

SEQ ID NO: 6333 - DNA, 84 bp, synthetic construct
  source 1..84: mol_type = other DNA
tttttttaagcagtggtatcaacgcagagtacnngaatgagcnnatggaaccnntttttttttttttttttttttttttttttt

SEQ ID NO: 6334 - DNA, 84 bp, synthetic construct
  source 1..84: mol_type = other DNA
tttttttaagcagtggtatcaacgcagagtacnngaatgagcnnagaggcatnntttttttttttttttttttttttttttttt

SEQ ID NO: 6335 - DNA, 84 bp, synthetic construct
  source 1..84: mol_type = other DNA
tttttttaagcagtggtatcaacgcagagtacnngaatgagcnntgcatagcnntttttttttttttttttttttttttttttt

SEQ ID NO: 6336 - DNA, 84 bp, synthetic construct
  source 1..84: mol_type = other DNA
tttttttaagcagtggtatcaacgcagagtacnngaatgagcnnctaacgganntttttttttttttttttttttttttttttt

SEQ ID NO: 6337 - DNA, 84 bp, synthetic construct
  source 1..84: mol_type = other DNA
tttttttaagcagtggtatcaacgcagagtacnngaatgagcnntatcgaggnntttttttttttttttttttttttttttttt

SEQ ID NO: 6338 - DNA, 84 bp, synthetic construct
  source 1..84: mol_type = other DNA
tttttttaagcagtggtatcaacgcagagtacnngaatgagcnncatagcctnntttttttttttttttttttttttttttttt

SEQ ID NO: 6339 - DNA, 84 bp, synthetic construct
  source 1..84: mol_type = other DNA
tttttttaagcagtggtatcaacgcagagtacnngaatgagcnnatcgagacnntttttttttttttttttttttttttttttt

SEQ ID NO: 6340 - DNA, 84 bp, synthetic construct
  source 1..84: mol_type = other DNA
tttttttaagcagtggtatcaacgcagagtacnngaatgagcnnggaagagtnntttttttttttttttttttttttttttttt

SEQ ID NO: 6341 - DNA, 84 bp, synthetic construct
  source 1..84: mol_type = other DNA
tttttttaagcagtggtatcaacgcagagtacnngaatgagcnnccaagtagnntttttttttttttttttttttttttttttt

SEQ ID NO: 6342 - DNA, 84 bp, synthetic construct
  source 1..84: mol_type = other DNA
tttttttaagcagtggtatcaacgcagagtacnngaatgagcnnctgaacagnntttttttttttttttttttttttttttttt

SEQ ID NO: 6343 - DNA, 84 bp, synthetic construct
  source 1..84: mol_type = other DNA
tttttttaagcagtggtatcaacgcagagtacnngaatgagcnngtaggttcnntttttttttttttttttttttttttttttt

SEQ ID NO: 6344 - DNA, 84 bp, synthetic construct
  source 1..84: mol_type = other DNA
tttttttaagcagtggtatcaacgcagagtacnngaatgagcnngtatggacnntttttttttttttttttttttttttttttt

SEQ ID NO: 6345 - DNA, 84 bp, synthetic construct
  source 1..84: mol_type = other DNA
tttttttaagcagtggtatcaacgcagagtacnngaatgagcnntcgcaacanntttttttttttttttttttttttttttttt

SEQ ID NO: 6346 - DNA, 84 bp, synthetic construct
  source 1..84: mol_type = other DNA
tttttttaagcagtggtatcaacgcagagtacnngaatgagcnnccgctaatnntttttttttttttttttttttttttttttt

SEQ ID NO: 6347 - DNA, 84 bp, synthetic construct
  source 1..84: mol_type = other DNA
tttttttaagcagtggtatcaacgcagagtacnngaatgagcnngattcgcanntttttttttttttttttttttttttttttt

SEQ ID NO: 6348 - DNA, 84 bp, synthetic construct
  source 1..84: mol_type = other DNA
tttttttaagcagtggtatcaacgcagagtacnngaatgagcnncgatggaanntttttttttttttttttttttttttttttt

SEQ ID NO: 6349 - DNA, 84 bp, synthetic construct
  source 1..84: mol_type = other DNA
tttttttaagcagtggtatcaacgcagagtacnngaatgagcnnagcaagganntttttttttttttttttttttttttttttt

SEQ ID NO: 6350 - DNA, 84 bp, synthetic construct
  source 1..84: mol_type = other DNA
tttttttaagcagtggtatcaacgcagagtacnngaatgagcnncgtagcaanntttttttttttttttttttttttttttttt

SEQ ID NO: 6351 - DNA, 84 bp, synthetic construct
  source 1..84: mol_type = other DNA
tttttttaagcagtggtatcaacgcagagtacnngaatgagcnntggcagtanntttttttttttttttttttttttttttttt

SEQ ID NO: 6352 - DNA, 84 bp, synthetic construct
  source 1..84: mol_type = other DNA
tttttttaagcagtggtatcaacgcagagtacnngaatgagcnncggtagttnntttttttttttttttttttttttttttttt

SEQ ID NO: 6353 - DNA, 84 bp, synthetic construct
  source 1..84: mol_type = other DNA
tttttttaagcagtggtatcaacgcagagtacnngaatgagcnntgacttcgnntttttttttttttttttttttttttttttt

SEQ ID NO: 6354 - DNA, 84 bp, synthetic construct
  source 1..84: mol_type = other DNA
tttttttaagcagtggtatcaacgcagagtacnngaatgagcnngagtgcaanntttttttttttttttttttttttttttttt

SEQ ID NO: 6355 - DNA, 84 bp, synthetic construct
  source 1..84: mol_type = other DNA
tttttttaagcagtggtatcaacgcagagtacnngaatgagcnnacggtaacnntttttttttttttttttttttttttttttt

SEQ ID NO: 6356 - DNA, 84 bp, synthetic construct
  source 1..84: mol_type = other DNA
tttttttaagcagtggtatcaacgcagagtacnngaatgagcnnaagtggtgnntttttttttttttttttttttttttttttt

SEQ ID NO: 6357 - DNA, 84 bp, synthetic construct
  source 1..84: mol_type = other DNA
tttttttaagcagtggtatcaacgcagagtacnngaatgagcnnggagacaanntttttttttttttttttttttttttttttt

SEQ ID NO: 6358 - DNA, 84 bp, synthetic construct
  source 1..84: mol_type = other DNA
tttttttaagcagtggtatcaacgcagagtacnngaatgagcnntcaaggacnntttttttttttttttttttttttttttttt

SEQ ID NO: 6359 - DNA, 84 bp, synthetic construct
  source 1..84: mol_type = other DNA
tttttttaagcagtggtatcaacgcagagtacnngaatgagcnnaagagagcnntttttttttttttttttttttttttttttt

SEQ ID NO: 6360 - DNA, 84 bp, synthetic construct
  source 1..84: mol_type = other DNA
tttttttaagcagtggtatcaacgcagagtacnngaatgagcnncgagagatnntttttttttttttttttttttttttttttt

SEQ ID NO: 6361 - DNA, 84 bp, synthetic construct
  source 1..84: mol_type = other DNA
tttttttaagcagtggtatcaacgcagagtacnngaatgagcnnacagatggnntttttttttttttttttttttttttttttt

SEQ ID NO: 6362 - DNA, 84 bp, synthetic construct
  source 1..84: mol_type = other DNA
tttttttaagcagtggtatcaacgcagagtacnngaatgagcnnaggagtcanntttttttttttttttttttttttttttttt

SEQ ID NO: 6363 - DNA, 84 bp, synthetic construct
  source 1..84: mol_type = other DNA
tttttttaagcagtggtatcaacgcagagtacnngaatgagcnncgtgttacnntttttttttttttttttttttttttttttt

SEQ ID NO: 6364 - DNA, 84 bp, synthetic construct
  source 1..84: mol_type = other DNA
tttttttaagcagtggtatcaacgcagagtacnngaatgagcnntagtgtgcnntttttttttttttttttttttttttttttt

SEQ ID NO: 6365 - DNA, 84 bp, synthetic construct
  source 1..84: mol_type = other DNA
tttttttaagcagtggtatcaacgcagagtacnngaatgagcnnctcatgacnntttttttttttttttttttttttttttttt

SEQ ID NO: 6366 - DNA, 84 bp, synthetic construct
  source 1..84: mol_type = other DNA
tttttttaagcagtggtatcaacgcagagtacnngaatgagcnngtatccagnntttttttttttttttttttttttttttttt

SEQ ID NO: 6367 - DNA, 84 bp, synthetic construct
  source 1..84: mol_type = other DNA
tttttttaagcagtggtatcaacgcagagtacnngaatgagcnnacgcctatnntttttttttttttttttttttttttttttt

SEQ ID NO: 6368 - DNA, 84 bp, synthetic construct
  source 1..84: mol_type = other DNA
tttttttaagcagtggtatcaacgcagagtacnngaatgagcnnaacgacctnntttttttttttttttttttttttttttttt

SEQ ID NO: 6369 - DNA, 84 bp, synthetic construct
  source 1..84: mol_type = other DNA
tttttttaagcagtggtatcaacgcagagtacnngaatgagcnnatcaggctnntttttttttttttttttttttttttttttt

SEQ ID NO: 6370 - DNA, 84 bp, synthetic construct
  source 1..84: mol_type = other DNA
tttttttaagcagtggtatcaacgcagagtacnngaatgagcnncaagttcgnntttttttttttttttttttttttttttttt

SEQ ID NO: 6371 - DNA, 84 bp, synthetic construct
  source 1..84: mol_type = other DNA
tttttttaagcagtggtatcaacgcagagtacnngaatgagcnntagccaganntttttttttttttttttttttttttttttt

SEQ ID NO: 6372 - DNA, 84 bp, synthetic construct
  source 1..84: mol_type = other DNA
tttttttaagcagtggtatcaacgcagagtacnngaatgagcnncaatcacgnntttttttttttttttttttttttttttttt

SEQ ID NO: 6373 - DNA, 84 bp, synthetic construct
  source 1..84: mol_type = other DNA
tttttttaagcagtggtatcaacgcagagtacnngaatgagcnngcaacaagnntttttttttttttttttttttttttttttt

SEQ ID NO: 6374 - DNA, 84 bp, synthetic construct
  source 1..84: mol_type = other DNA
tttttttaagcagtggtatcaacgcagagtacnngaatgagcnncacgacaanntttttttttttttttttttttttttttttt

SEQ ID NO: 6375 - DNA, 84 bp, synthetic construct
  source 1..84: mol_type = other DNA
tttttttaagcagtggtatcaacgcagagtacnngaatgagcnntacggaganntttttttttttttttttttttttttttttt

SEQ ID NO: 6376 - DNA, 84 bp, synthetic construct
  source 1..84: mol_type = other DNA
tttttttaagcagtggtatcaacgcagagtacnngaatgagcnncgacaaganntttttttttttttttttttttttttttttt

SEQ ID NO: 6377 - DNA, 84 bp, synthetic construct
  source 1..84: mol_type = other DNA
tttttttaagcagtggtatcaacgcagagtacnngaatgagcnncgaagtganntttttttttttttttttttttttttttttt

SEQ ID NO: 6378 - DNA, 84 bp, synthetic construct
  source 1..84: mol_type = other DNA
tttttttaagcagtggtatcaacgcagagtacnngaatgagcnnagctggtanntttttttttttttttttttttttttttttt

SEQ ID NO: 6379 - DNA, 84 bp, synthetic construct
  source 1..84: mol_type = other DNA
tttttttaagcagtggtatcaacgcagagtacnngaatgagcnnaactaggcnntttttttttttttttttttttttttttttt

SEQ ID NO: 6380 - DNA, 84 bp, synthetic construct
  source 1..84: mol_type = other DNA
tttttttaagcagtggtatcaacgcagagtacnngaatgagcnncagcaagtnntttttttttttttttttttttttttttttt

SEQ ID NO: 6381 - DNA, 84 bp, synthetic construct
  source 1..84: mol_type = other DNA
tttttttaagcagtggtatcaacgcagagtacnngaatgagcnnacgaggtanntttttttttttttttttttttttttttttt

SEQ ID NO: 6382 - DNA, 84 bp, synthetic construct
  source 1..84: mol_type = other DNA
tttttttaagcagtggtatcaacgcagagtacnngaatgagcnncatcttccnntttttttttttttttttttttttttttttt

SEQ ID NO: 6383 - DNA, 84 bp, synthetic construct
  source 1..84: mol_type = other DNA
tttttttaagcagtggtatcaacgcagagtacnngaatgagcnncctgaatcnntttttttttttttttttttttttttttttt

SEQ ID NO: 6384 - DNA, 84 bp, synthetic construct
  source 1..84: mol_type = other DNA
tttttttaagcagtggtatcaacgcagagtacnngaatgagcnntgcagactnntttttttttttttttttttttttttttttt

SEQ ID NO: 6385 - DNA, 84 bp, synthetic construct
  source 1..84: mol_type = other DNA
tttttttaagcagtggtatcaacgcagagtacnngaatgagcnnagatgtggnntttttttttttttttttttttttttttttt

SEQ ID NO: 6386 - DNA, 84 bp, synthetic construct
  source 1..84: mol_type = other DNA
tttttttaagcagtggtatcaacgcagagtacnngaatgagcnnagttcgacnntttttttttttttttttttttttttttttt

SEQ ID NO: 6387 - DNA, 84 bp, synthetic construct
  source 1..84: mol_type = other DNA
tttttttaagcagtggtatcaacgcagagtacnngaatgagcnnacaacctcnntttttttttttttttttttttttttttttt

SEQ ID NO: 6388 - DNA, 84 bp, synthetic construct
  source 1..84: mol_type = other DNA
tttttttaagcagtggtatcaacgcagagtacnngaatgagcnncatggtagnntttttttttttttttttttttttttttttt

SEQ ID NO: 6389 - DNA, 84 bp, synthetic construct
  source 1..84: mol_type = other DNA
tttttttaagcagtggtatcaacgcagagtacnngaatgagcnncgtatctcnntttttttttttttttttttttttttttttt

SEQ ID NO: 6390 - DNA, 84 bp, synthetic construct
  source 1..84: mol_type = other DNA
tttttttaagcagtggtatcaacgcagagtacnngaatgagcnncctagttcnntttttttttttttttttttttttttttttt

SEQ ID NO: 6391 - DNA, 84 bp, synthetic construct
  source 1..84: mol_type = other DNA
tttttttaagcagtggtatcaacgcagagtacnngaatgagcnncaagagtcnntttttttttttttttttttttttttttttt

SEQ ID NO: 6392 - DNA, 84 bp, synthetic construct
  source 1..84: mol_type = other DNA
tttttttaagcagtggtatcaacgcagagtacnngaggagaannaatcggcanntttttttttttttttttttttttttttttt

SEQ ID NO: 6393 - DNA, 84 bp, synthetic construct
  source 1..84: mol_type = other DNA
tttttttaagcagtggtatcaacgcagagtacnngaggagaanntacggcatnntttttttttttttttttttttttttttttt

SEQ ID NO: 6394 - DNA, 84 bp, synthetic construct
  source 1..84: mol_type = other DNA
tttttttaagcagtggtatcaacgcagagtacnngaggagaannttggatcgnntttttttttttttttttttttttttttttt

SEQ ID NO: 6395 - DNA, 84 bp, synthetic construct
  source 1..84: mol_type = other DNA
tttttttaagcagtggtatcaacgcagagtacnngaggagaanntggaacganntttttttttttttttttttttttttttttt

SEQ ID NO: 6396 - DNA, 84 bp, synthetic construct
  source 1..84: mol_type = other DNA
tttttttaagcagtggtatcaacgcagagtacnngaggagaannggcaatcanntttttttttttttttttttttttttttttt

SEQ ID NO: 6397 - DNA, 84 bp, synthetic construct
  source 1..84: mol_type = other DNA
tttttttaagcagtggtatcaacgcagagtacnngaggagaanngaatccganntttttttttttttttttttttttttttttt

SEQ ID NO: 6398 - DNA, 84 bp, synthetic construct
  source 1..84: mol_type = other DNA
tttttttaagcagtggtatcaacgcagagtacnngaggagaannttacggtgnntttttttttttttttttttttttttttttt

SEQ ID NO: 6399 - DNA, 84 bp, synthetic construct
  source 1..84: mol_type = other DNA
tttttttaagcagtggtatcaacgcagagtacnngaggagaanncatatcggnntttttttttttttttttttttttttttttt

SEQ ID NO: 6400 - DNA, 84 bp, synthetic construct
  source 1..84: mol_type = other DNA
tttttttaagcagtggtatcaacgcagagtacnngaggagaanncttcggtanntttttttttttttttttttttttttttttt

SEQ ID NO: 6401 - DNA, 84 bp, synthetic construct
  source 1..84: mol_type = other DNA
tttttttaagcagtggtatcaacgcagagtacnngaggagaanntcctaacgnntttttttttttttttttttttttttttttt

SEQ ID NO: 6402 - DNA, 84 bp, synthetic construct
  source 1..84: mol_type = other DNA
tttttttaagcagtggtatcaacgcagagtacnngaggagaanngtaagccanntttttttttttttttttttttttttttttt

SEQ ID NO: 6403 - DNA, 84 bp, synthetic construct
  source 1..84: mol_type = other DNA
tttttttaagcagtggtatcaacgcagagtacnngaggagaanntaaggtggnntttttttttttttttttttttttttttttt

SEQ ID NO: 6404 - DNA, 84 bp, synthetic construct
  source 1..84: mol_type = other DNA
tttttttaagcagtggtatcaacgcagagtacnngaggagaannggtaagctnntttttttttttttttttttttttttttttt

SEQ ID NO: 6405 - DNA, 84 bp, synthetic construct
  source 1..84: mol_type = other DNA
tttttttaagcagtggtatcaacgcagagtacnngaggagaanntgtgtcganntttttttttttttttttttttttttttttt

SEQ ID NO: 6406 - DNA, 84 bp, synthetic construct
  source 1..84: mol_type = other DNA
tttttttaagcagtggtatcaacgcagagtacnngaggagaanngagcatganntttttttttttttttttttttttttttttt

SEQ ID NO: 6407 - DNA, 84 bp, synthetic construct
  source 1..84: mol_type = other DNA
tttttttaagcagtggtatcaacgcagagtacnngaggagaanntcgaagtcnntttttttttttttttttttttttttttttt

SEQ ID NO: 6408 - DNA, 84 bp, synthetic construct
  source 1..84: mol_type = other DNA
tttttttaagcagtggtatcaacgcagagtacnngaggagaannggtgaacanntttttttttttttttttttttttttttttt

SEQ ID NO: 6409 - DNA, 84 bp, synthetic construct
  source 1..84: mol_type = other DNA
tttttttaagcagtggtatcaacgcagagtacnngaggagaannacatgcacnntttttttttttttttttttttttttttttt

SEQ ID NO: 6410 - DNA, 84 bp, synthetic construct
  source 1..84: mol_type = other DNA
tttttttaagcagtggtatcaacgcagagtacnngaggagaannccaacagtnntttttttttttttttttttttttttttttt

SEQ ID NO: 6411 - DNA, 84 bp, synthetic construct
  source 1..84: mol_type = other DNA
tttttttaagcagtggtatcaacgcagagtacnngaggagaannagaacagcnntttttttttttttttttttttttttttttt

SEQ ID NO: 6412 - DNA, 84 bp, synthetic construct
  source 1..84: mol_type = other DNA
tttttttaagcagtggtatcaacgcagagtacnngaggagaanngaacacgtnntttttttttttttttttttttttttttttt

SEQ ID NO: 6413 - DNA, 84 bp, synthetic construct
  source 1..84: mol_type = other DNA
tttttttaagcagtggtatcaacgcagagtacnngaggagaannggtcttcanntttttttttttttttttttttttttttttt

SEQ ID NO: 6414 - DNA, 84 bp, synthetic construct
  source 1..84: mol_type = other DNA
tttttttaagcagtggtatcaacgcagagtacnngaggagaannaggttcagnntttttttttttttttttttttttttttttt

SEQ ID NO: 6415 - DNA, 84 bp, synthetic construct
  source 1..84: mol_type = other DNA
tttttttaagcagtggtatcaacgcagagtacnngaggagaannctagagcanntttttttttttttttttttttttttttttt

SEQ ID NO: 6416 - DNA, 84 bp, synthetic construct
  source 1..84: mol_type = other DNA
tttttttaagcagtggtatcaacgcagagtacnngaggagaanncttctagcnntttttttttttttttttttttttttttttt

SEQ ID NO: 6417 - DNA, 84 bp, synthetic construct
  source 1..84: mol_type = other DNA
tttttttaagcagtggtatcaacgcagagtacnngaggagaanngagtaacgnntttttttttttttttttttttttttttttt

SEQ ID NO: 6418 - DNA, 84 bp, synthetic construct
  source 1..84: mol_type = other DNA
tttttttaagcagtggtatcaacgcagagtacnngaggagaannctaagaggnntttttttttttttttttttttttttttttt

SEQ ID NO: 6419 - DNA, 84 bp, synthetic construct
  source 1..84: mol_type = other DNA
tttttttaagcagtggtatcaacgcagagtacnngaggagaannacgtgtagnntttttttttttttttttttttttttttttt

SEQ ID NO: 6420 - DNA, 84 bp, synthetic construct
  source 1..84: mol_type = other DNA
tttttttaagcagtggtatcaacgcagagtacnngaggagaannactacaggnntttttttttttttttttttttttttttttt

SEQ ID NO: 6421 - DNA, 84 bp, synthetic construct
  source 1..84: mol_type = other DNA
tttttttaagcagtggtatcaacgcagagtacnngaggagaanntacaggtcnntttttttttttttttttttttttttttttt

SEQ ID NO: 6422 - DNA, 84 bp, synthetic construct
  source 1..84: mol_type = other DNA
tttttttaagcagtggtatcaacgcagagtacnngaggagaannctcacatgnntttttttttttttttttttttttttttttt

SEQ ID NO: 6423 - DNA, 84 bp, synthetic construct
  source 1..84: mol_type = other DNA
tttttttaagcagtggtatcaacgcagagtacnngaggagaannactaggagnntttttttttttttttttttttttttttttt

SEQ ID NO: 6424 - DNA, 84 bp, synthetic construct
  source 1..84: mol_type = other DNA
tttttttaagcagtggtatcaacgcagagtacnngaggagaannccatagganntttttttttttttttttttttttttttttt

SEQ ID NO: 6425 - DNA, 84 bp, synthetic construct
  source 1..84: mol_type = other DNA
tttttttaagcagtggtatcaacgcagagtacnngaggagaannggagaatcnntttttttttttttttttttttttttttttt

SEQ ID NO: 6426 - DNA, 84 bp, synthetic construct
  source 1..84: mol_type = other DNA
tttttttaagcagtggtatcaacgcagagtacnngaggagaanngccaagaanntttttttttttttttttttttttttttttt

SEQ ID NO: 6427 - DNA, 84 bp, synthetic construct
  source 1..84: mol_type = other DNA
tttttttaagcagtggtatcaacgcagagtacnngaggagaannaaggcaagnntttttttttttttttttttttttttttttt

SEQ ID NO: 6428 - DNA, 84 bp, synthetic construct
  source 1..84: mol_type = other DNA
tttttttaagcagtggtatcaacgcagagtacnngaggagaannaatgtcgcnntttttttttttttttttttttttttttttt

SEQ ID NO: 6429 - DNA, 84 bp, synthetic construct
  source 1..84: mol_type = other DNA
tttttttaagcagtggtatcaacgcagagtacnngaggagaannatggaaccnntttttttttttttttttttttttttttttt

SEQ ID NO: 6430 - DNA, 84 bp, synthetic construct
  source 1..84: mol_type = other DNA
tttttttaagcagtggtatcaacgcagagtacnngaggagaannagaggcatnntttttttttttttttttttttttttttttt

SEQ ID NO: 6431 - DNA, 84 bp, synthetic construct
  source 1..84: mol_type = other DNA
tttttttaagcagtggtatcaacgcagagtacnngaggagaanntgcatagcnntttttttttttttttttttttttttttttt

SEQ ID NO: 6432 - DNA, 84 bp, synthetic construct
  source 1..84: mol_type = other DNA
tttttttaagcagtggtatcaacgcagagtacnngaggagaannctaacgganntttttttttttttttttttttttttttttt

SEQ ID NO: 6433 - DNA, 84 bp, synthetic construct
  source 1..84: mol_type = other DNA
tttttttaagcagtggtatcaacgcagagtacnngaggagaanntatcgaggnntttttttttttttttttttttttttttttt

SEQ ID NO: 6434 - DNA, 84 bp, synthetic construct
  source 1..84: mol_type = other DNA
tttttttaagcagtggtatcaacgcagagtacnngaggagaanncatagcctnntttttttttttttttttttttttttttttt

SEQ ID NO: 6435 - DNA, 84 bp, synthetic construct
  source 1..84: mol_type = other DNA
tttttttaagcagtggtatcaacgcagagtacnngaggagaannatcgagacnntttttttttttttttttttttttttttttt

SEQ ID NO: 6436 - DNA, 84 bp, synthetic construct
  source 1..84: mol_type = other DNA
tttttttaagcagtggtatcaacgcagagtacnngaggagaannggaagagtnntttttttttttttttttttttttttttttt

SEQ ID NO: 6437 - DNA, 84 bp, synthetic construct
  source 1..84: mol_type = other DNA
tttttttaagcagtggtatcaacgcagagtacnngaggagaannccaagtagnntttttttttttttttttttttttttttttt

SEQ ID NO: 6438 - DNA, 84 bp, synthetic construct
  source 1..84: mol_type = other DNA
tttttttaagcagtggtatcaacgcagagtacnngaggagaannctgaacagnntttttttttttttttttttttttttttttt

SEQ ID NO: 6439 - DNA, 84 bp, synthetic construct
  source 1..84: mol_type = other DNA
tttttttaagcagtggtatcaacgcagagtacnngaggagaanngtaggttcnntttttttttttttttttttttttttttttt

SEQ ID NO: 6440 - DNA, 84 bp, synthetic construct
  source 1..84: mol_type = other DNA
tttttttaagcagtggtatcaacgcagagtacnngaggagaanngtatggacnntttttttttttttttttttttttttttttt

SEQ ID NO: 6441 - DNA, 84 bp, synthetic construct
  source 1..84: mol_type = other DNA
tttttttaagcagtggtatcaacgcagagtacnngaggagaanntcgcaacanntttttttttttttttttttttttttttttt

SEQ ID NO: 6442 - DNA, 84 bp, synthetic construct
  source 1..84: mol_type = other DNA
tttttttaagcagtggtatcaacgcagagtacnngaggagaannccgctaatnntttttttttttttttttttttttttttttt

SEQ ID NO: 6443 - DNA, 84 bp, synthetic construct
  source 1..84: mol_type = other DNA
tttttttaagcagtggtatcaacgcagagtacnngaggagaanngattcgcanntttttttttttttttttttttttttttttt

SEQ ID NO: 6444 - DNA, 84 bp, synthetic construct
  source 1..84: mol_type = other DNA
tttttttaagcagtggtatcaacgcagagtacnngaggagaanncgatggaanntttttttttttttttttttttttttttttt

SEQ ID NO: 6445 - DNA, 84 bp, synthetic construct
  source 1..84: mol_type = other DNA
tttttttaagcagtggtatcaacgcagagtacnngaggagaannagcaagganntttttttttttttttttttttttttttttt

SEQ ID NO: 6446 - DNA, 84 bp, synthetic construct
  source 1..84: mol_type = other DNA
tttttttaagcagtggtatcaacgcagagtacnngaggagaanncgtagcaanntttttttttttttttttttttttttttttt

SEQ ID NO: 6447 - DNA, 84 bp, synthetic construct
  source 1..84: mol_type = other DNA
tttttttaagcagtggtatcaacgcagagtacnngaggagaanntggcagtanntttttttttttttttttttttttttttttt

SEQ ID NO: 6448 - DNA, 84 bp, synthetic construct
  source 1..84: mol_type = other DNA
tttttttaagcagtggtatcaacgcagagtacnngaggagaanncggtagttnntttttttttttttttttttttttttttttt

SEQ ID NO: 6449 - DNA, 84 bp, synthetic construct
  source 1..84: mol_type = other DNA
tttttttaagcagtggtatcaacgcagagtacnngaggagaanntgacttcgnntttttttttttttttttttttttttttttt

SEQ ID NO: 6450 - DNA, 84 bp, synthetic construct
  source 1..84: mol_type = other DNA
tttttttaagcagtggtatcaacgcagagtacnngaggagaanngagtgcaanntttttttttttttttttttttttttttttt

SEQ ID NO: 6451 - DNA, 84 bp, synthetic construct
  source 1..84: mol_type = other DNA
tttttttaagcagtggtatcaacgcagagtacnngaggagaannacggtaacnntttttttttttttttttttttttttttttt

SEQ ID NO: 6452 - DNA, 84 bp, synthetic construct
  source 1..84: mol_type = other DNA
tttttttaagcagtggtatcaacgcagagtacnngaggagaannaagtggtgnntttttttttttttttttttttttttttttt

SEQ ID NO: 6453 - DNA, 84 bp, synthetic construct
  source 1..84: mol_type = other DNA
tttttttaagcagtggtatcaacgcagagtacnngaggagaannggagacaanntttttttttttttttttttttttttttttt

SEQ ID NO: 6454 - DNA, 84 bp, synthetic construct
  source 1..84: mol_type = other DNA
tttttttaagcagtggtatcaacgcagagtacnngaggagaanntcaaggacnntttttttttttttttttttttttttttttt

SEQ ID NO: 6455 - DNA, 84 bp, synthetic construct
  source 1..84: mol_type = other DNA
tttttttaagcagtggtatcaacgcagagtacnngaggagaannaagagagcnntttttttttttttttttttttttttttttt

SEQ ID NO: 6456 - DNA, 84 bp, synthetic construct
  source 1..84: mol_type = other DNA
tttttttaagcagtggtatcaacgcagagtacnngaggagaanncgagagatnntttttttttttttttttttttttttttttt

SEQ ID NO: 6457 - DNA, 84 bp, synthetic construct
  source 1..84: mol_type = other DNA
tttttttaagcagtggtatcaacgcagagtacnngaggagaannacagatggnntttttttttttttttttttttttttttttt

SEQ ID NO: 6458 - DNA, 84 bp, synthetic construct
  source 1..84: mol_type = other DNA
tttttttaagcagtggtatcaacgcagagtacnngaggagaannaggagtcanntttttttttttttttttttttttttttttt

SEQ ID NO: 6459 - DNA, 84 bp, synthetic construct
  source 1..84: mol_type = other DNA
tttttttaagcagtggtatcaacgcagagtacnngaggagaanncgtgttacnntttttttttttttttttttttttttttttt

SEQ ID NO: 6460 - DNA, 84 bp, synthetic construct
  source 1..84: mol_type = other DNA
tttttttaagcagtggtatcaacgcagagtacnngaggagaanntagtgtgcnntttttttttttttttttttttttttttttt

SEQ ID NO: 6461 - DNA, 84 bp, synthetic construct
  source 1..84: mol_type = other DNA
tttttttaagcagtggtatcaacgcagagtacnngaggagaannctcatgacnntttttttttttttttttttttttttttttt

SEQ ID NO: 6462 - DNA, 84 bp, synthetic construct
  source 1..84: mol_type = other DNA
tttttttaagcagtggtatcaacgcagagtacnngaggagaanngtatccagnntttttttttttttttttttttttttttttt

SEQ ID NO: 6463 - DNA, 84 bp, synthetic construct
  source 1..84: mol_type = other DNA
tttttttaagcagtggtatcaacgcagagtacnngaggagaannacgcctatnntttttttttttttttttttttttttttttt

SEQ ID NO: 6464 - DNA, 84 bp, synthetic construct
  source 1..84: mol_type = other DNA
tttttttaagcagtggtatcaacgcagagtacnngaggagaannaacgacctnntttttttttttttttttttttttttttttt

SEQ ID NO: 6465 - DNA, 84 bp, synthetic construct
  source 1..84: mol_type = other DNA
tttttttaagcagtggtatcaacgcagagtacnngaggagaannatcaggctnntttttttttttttttttttttttttttttt

SEQ ID NO: 6466 - DNA, 84 bp, synthetic construct
  source 1..84: mol_type = other DNA
tttttttaagcagtggtatcaacgcagagtacnngaggagaanncaagttcgnntttttttttttttttttttttttttttttt

SEQ ID NO: 6467 - DNA, 84 bp, synthetic construct
  source 1..84: mol_type = other DNA
tttttttaagcagtggtatcaacgcagagtacnngaggagaanntagccaganntttttttttttttttttttttttttttttt

SEQ ID NO: 6468 - DNA, 84 bp, synthetic construct
  source 1..84: mol_type = other DNA
tttttttaagcagtggtatcaacgcagagtacnngaggagaanncaatcacgnntttttttttttttttttttttttttttttt

SEQ ID NO: 6469 - DNA, 84 bp, synthetic construct
  source 1..84: mol_type = other DNA
tttttttaagcagtggtatcaacgcagagtacnngaggagaanngcaacaagnntttttttttttttttttttttttttttttt

SEQ ID NO: 6470 - DNA, 84 bp, synthetic construct
  source 1..84: mol_type = other DNA
tttttttaagcagtggtatcaacgcagagtacnngaggagaanncacgacaanntttttttttttttttttttttttttttttt

SEQ ID NO: 6471 - DNA, 84 bp, synthetic construct
  source 1..84: mol_type = other DNA
tttttttaagcagtggtatcaacgcagagtacnngaggagaanntacggaganntttttttttttttttttttttttttttttt

SEQ ID NO: 6472 - DNA, 84 bp, synthetic construct
  source 1..84: mol_type = other DNA
tttttttaagcagtggtatcaacgcagagtacnngaggagaanncgacaaganntttttttttttttttttttttttttttttt

SEQ ID NO: 6473 - DNA, 84 bp, synthetic construct
  source 1..84: mol_type = other DNA
tttttttaagcagtggtatcaacgcagagtacnngaggagaanncgaagtganntttttttttttttttttttttttttttttt

SEQ ID NO: 6474 - DNA, 84 bp, synthetic construct
  source 1..84: mol_type = other DNA
tttttttaagcagtggtatcaacgcagagtacnngaggagaannagctggtanntttttttttttttttttttttttttttttt

SEQ ID NO: 6475 - DNA, 84 bp, synthetic construct
  source 1..84: mol_type = other DNA
tttttttaagcagtggtatcaacgcagagtacnngaggagaannaactaggcnntttttttttttttttttttttttttttttt

SEQ ID NO: 6476 - DNA, 84 bp, synthetic construct
  source 1..84: mol_type = other DNA
tttttttaagcagtggtatcaacgcagagtacnngaggagaanncagcaagtnntttttttttttttttttttttttttttttt

SEQ ID NO: 6477 - DNA, 84 bp, synthetic construct
  source 1..84: mol_type = other DNA
tttttttaagcagtggtatcaacgcagagtacnngaggagaannacgaggtanntttttttttttttttttttttttttttttt

SEQ ID NO: 6478 - DNA, 84 bp, synthetic construct
  source 1..84: mol_type = other DNA
tttttttaagcagtggtatcaacgcagagtacnngaggagaanncatcttccnntttttttttttttttttttttttttttttt

SEQ ID NO: 6479 - DNA, 84 bp, synthetic construct
  source 1..84: mol_type = other DNA
tttttttaagcagtggtatcaacgcagagtacnngaggagaanncctgaatcnntttttttttttttttttttttttttttttt

SEQ ID NO: 6480 - DNA, 84 bp, synthetic construct
  source 1..84: mol_type = other DNA
tttttttaagcagtggtatcaacgcagagtacnngaggagaanntgcagactnntttttttttttttttttttttttttttttt

SEQ ID NO: 6481 - DNA, 84 bp, synthetic construct
  source 1..84: mol_type = other DNA
tttttttaagcagtggtatcaacgcagagtacnngaggagaannagatgtggnntttttttttttttttttttttttttttttt

SEQ ID NO: 6482 - DNA, 84 bp, synthetic construct
  source 1..84: mol_type = other DNA
tttttttaagcagtggtatcaacgcagagtacnngaggagaannagttcgacnntttttttttttttttttttttttttttttt

SEQ ID NO: 6483 - DNA, 84 bp, synthetic construct
  source 1..84: mol_type = other DNA
tttttttaagcagtggtatcaacgcagagtacnngaggagaannacaacctcnntttttttttttttttttttttttttttttt

SEQ ID NO: 6484 - DNA, 84 bp, synthetic construct
  source 1..84: mol_type = other DNA
tttttttaagcagtggtatcaacgcagagtacnngaggagaanncatggtagnntttttttttttttttttttttttttttttt

SEQ ID NO: 6485 - DNA, 84 bp, synthetic construct
  source 1..84: mol_type = other DNA
tttttttaagcagtggtatcaacgcagagtacnngaggagaanncgtatctcnntttttttttttttttttttttttttttttt

SEQ ID NO: 6486 - DNA, 84 bp, synthetic construct
  source 1..84: mol_type = other DNA
tttttttaagcagtggtatcaacgcagagtacnngaggagaanncctagttcnntttttttttttttttttttttttttttttt

SEQ ID NO: 6487 - DNA, 84 bp, synthetic construct
  source 1..84: mol_type = other DNA
tttttttaagcagtggtatcaacgcagagtacnngaggagaanncaagagtcnntttttttttttttttttttttttttttttt

SEQ ID NO: 6488 - DNA, 84 bp, synthetic construct
  source 1..84: mol_type = other DNA
tttttttaagcagtggtatcaacgcagagtacnngagatggtnnaatcggcanntttttttttttttttttttttttttttttt

SEQ ID NO: 6489 - DNA, 84 bp, synthetic construct
  source 1..84: mol_type = other DNA
tttttttaagcagtggtatcaacgcagagtacnngagatggtnntacggcatnntttttttttttttttttttttttttttttt

SEQ ID NO: 6490 - DNA, 84 bp, synthetic construct
  source 1..84: mol_type = other DNA
tttttttaagcagtggtatcaacgcagagtacnngagatggtnnttggatcgnntttttttttttttttttttttttttttttt

SEQ ID NO: 6491 - DNA, 84 bp, synthetic construct
  source 1..84: mol_type = other DNA
tttttttaagcagtggtatcaacgcagagtacnngagatggtnntggaacganntttttttttttttttttttttttttttttt

SEQ ID NO: 6492 - DNA, 84 bp, synthetic construct
  source 1..84: mol_type = other DNA
tttttttaagcagtggtatcaacgcagagtacnngagatggtnnggcaatcanntttttttttttttttttttttttttttttt

SEQ ID NO: 6493 - DNA, 84 bp, synthetic construct
  source 1..84: mol_type = other DNA
tttttttaagcagtggtatcaacgcagagtacnngagatggtnngaatccganntttttttttttttttttttttttttttttt

SEQ ID NO: 6494 - DNA, 84 bp, synthetic construct
  source 1..84: mol_type = other DNA
tttttttaagcagtggtatcaacgcagagtacnngagatggtnnttacggtgnntttttttttttttttttttttttttttttt

SEQ ID NO: 6495 - DNA, 84 bp, synthetic construct
  source 1..84: mol_type = other DNA
tttttttaagcagtggtatcaacgcagagtacnngagatggtnncatatcggnntttttttttttttttttttttttttttttt

SEQ ID NO: 6496 - DNA, 84 bp, synthetic construct
  source 1..84: mol_type = other DNA
tttttttaagcagtggtatcaacgcagagtacnngagatggtnncttcggtanntttttttttttttttttttttttttttttt

SEQ ID NO: 6497 - DNA, 84 bp, synthetic construct
  source 1..84: mol_type = other DNA
tttttttaagcagtggtatcaacgcagagtacnngagatggtnntcctaacgnntttttttttttttttttttttttttttttt

SEQ ID NO: 6498 - DNA, 84 bp, synthetic construct
  source 1..84: mol_type = other DNA
tttttttaagcagtggtatcaacgcagagtacnngagatggtnngtaagccanntttttttttttttttttttttttttttttt

SEQ ID NO: 6499 - DNA, 84 bp, synthetic construct
  source 1..84: mol_type = other DNA
tttttttaagcagtggtatcaacgcagagtacnngagatggtnntaaggtggnntttttttttttttttttttttttttttttt

SEQ ID NO: 6500 - DNA, 84 bp, synthetic construct
  source 1..84: mol_type = other DNA
tttttttaagcagtggtatcaacgcagagtacnngagatggtnnggtaagctnntttttttttttttttttttttttttttttt

SEQ ID NO: 6501 - DNA, 84 bp, synthetic construct
  source 1..84: mol_type = other DNA
tttttttaagcagtggtatcaacgcagagtacnngagatggtnntgtgtcganntttttttttttttttttttttttttttttt

SEQ ID NO: 6502 - DNA, 84 bp, synthetic construct
  source 1..84: mol_type = other DNA
tttttttaagcagtggtatcaacgcagagtacnngagatggtnngagcatganntttttttttttttttttttttttttttttt

SEQ ID NO: 6503 - DNA, 84 bp, synthetic construct
  source 1..84: mol_type = other DNA
tttttttaagcagtggtatcaacgcagagtacnngagatggtnntcgaagtcnntttttttttttttttttttttttttttttt

SEQ ID NO: 6504 - DNA, 84 bp, synthetic construct
  source 1..84: mol_type = other DNA
tttttttaagcagtggtatcaacgcagagtacnngagatggtnnggtgaacanntttttttttttttttttttttttttttttt

SEQ ID NO: 6505 - DNA, 84 bp, synthetic construct
  source 1..84: mol_type = other DNA
tttttttaagcagtggtatcaacgcagagtacnngagatggtnnacatgcacnntttttttttttttttttttttttttttttt

SEQ ID NO: 6506 - DNA, 84 bp, synthetic construct
  source 1..84: mol_type = other DNA
tttttttaagcagtggtatcaacgcagagtacnngagatggtnnccaacagtnntttttttttttttttttttttttttttttt

SEQ ID NO: 6507 - DNA, 84 bp, synthetic construct
  source 1..84: mol_type = other DNA
tttttttaagcagtggtatcaacgcagagtacnngagatggtnnagaacagcnntttttttttttttttttttttttttttttt

SEQ ID NO: 6508 - DNA, 84 bp, synthetic construct
  source 1..84: mol_type = other DNA
tttttttaagcagtggtatcaacgcagagtacnngagatggtnngaacacgtnntttttttttttttttttttttttttttttt

SEQ ID NO: 6509 - DNA, 84 bp, synthetic construct
  source 1..84: mol_type = other DNA
tttttttaagcagtggtatcaacgcagagtacnngagatggtnnggtcttcanntttttttttttttttttttttttttttttt

SEQ ID NO: 6510 - DNA, 84 bp, synthetic construct
  source 1..84: mol_type = other DNA
tttttttaagcagtggtatcaacgcagagtacnngagatggtnnaggttcagnntttttttttttttttttttttttttttttt

SEQ ID NO: 6511 - DNA, 84 bp, synthetic construct
  source 1..84: mol_type = other DNA
tttttttaagcagtggtatcaacgcagagtacnngagatggtnnctagagcanntttttttttttttttttttttttttttttt

SEQ ID NO: 6512 - DNA, 84 bp, synthetic construct
  source 1..84: mol_type = other DNA
tttttttaagcagtggtatcaacgcagagtacnngagatggtnncttctagcnntttttttttttttttttttttttttttttt

SEQ ID NO: 6513 - DNA, 84 bp, synthetic construct
  source 1..84: mol_type = other DNA
tttttttaagcagtggtatcaacgcagagtacnngagatggtnngagtaacgnntttttttttttttttttttttttttttttt

SEQ ID NO: 6514 - DNA, 84 bp, synthetic construct
  source 1..84: mol_type = other DNA
tttttttaagcagtggtatcaacgcagagtacnngagatggtnnctaagaggnntttttttttttttttttttttttttttttt

SEQ ID NO: 6515 - DNA, 84 bp, synthetic construct
  source 1..84: mol_type = other DNA
tttttttaagcagtggtatcaacgcagagtacnngagatggtnnacgtgtagnntttttttttttttttttttttttttttttt

SEQ ID NO: 6516 - DNA, 84 bp, synthetic construct
  source 1..84: mol_type = other DNA
tttttttaagcagtggtatcaacgcagagtacnngagatggtnnactacaggnntttttttttttttttttttttttttttttt

SEQ ID NO: 6517 - DNA, 84 bp, synthetic construct
  source 1..84: mol_type = other DNA
tttttttaagcagtggtatcaacgcagagtacnngagatggtnntacaggtcnntttttttttttttttttttttttttttttt

SEQ ID NO: 6518 - DNA, 84 bp, synthetic construct
  source 1..84: mol_type = other DNA
tttttttaagcagtggtatcaacgcagagtacnngagatggtnnctcacatgnntttttttttttttttttttttttttttttt

SEQ ID NO: 6519 - DNA, 84 bp, synthetic construct
  source 1..84: mol_type = other DNA
tttttttaagcagtggtatcaacgcagagtacnngagatggtnnactaggagnntttttttttttttttttttttttttttttt

SEQ ID NO: 6520 - DNA, 84 bp, synthetic construct
  source 1..84: mol_type = other DNA
tttttttaagcagtggtatcaacgcagagtacnngagatggtnnccatagganntttttttttttttttttttttttttttttt

SEQ ID NO: 6521 - DNA, 84 bp, synthetic construct
  source 1..84: mol_type = other DNA
tttttttaagcagtggtatcaacgcagagtacnngagatggtnnggagaatcnntttttttttttttttttttttttttttttt

SEQ ID NO: 6522 - DNA, 84 bp, synthetic construct
  source 1..84: mol_type = other DNA
tttttttaagcagtggtatcaacgcagagtacnngagatggtnngccaagaanntttttttttttttttttttttttttttttt

SEQ ID NO: 6523 - DNA, 84 bp, synthetic construct
  source 1..84: mol_type = other DNA
tttttttaagcagtggtatcaacgcagagtacnngagatggtnnaaggcaagnntttttttttttttttttttttttttttttt

SEQ ID NO: 6524 - DNA, 84 bp, synthetic construct
  source 1..84: mol_type = other DNA
tttttttaagcagtggtatcaacgcagagtacnngagatggtnnaatgtcgcnntttttttttttttttttttttttttttttt

SEQ ID NO: 6525 - DNA, 84 bp, synthetic construct
  source 1..84: mol_type = other DNA
tttttttaagcagtggtatcaacgcagagtacnngagatggtnnatggaaccnntttttttttttttttttttttttttttttt

SEQ ID NO: 6526 - DNA, 84 bp, synthetic construct
  source 1..84: mol_type = other DNA
tttttttaagcagtggtatcaacgcagagtacnngagatggtnnagaggcatnntttttttttttttttttttttttttttttt

SEQ ID NO: 6527 - DNA, 84 bp, synthetic construct
  source 1..84: mol_type = other DNA
tttttttaagcagtggtatcaacgcagagtacnngagatggtnntgcatagcnntttttttttttttttttttttttttttttt

SEQ ID NO: 6528 - DNA, 84 bp, synthetic construct
  source 1..84: mol_type = other DNA
tttttttaagcagtggtatcaacgcagagtacnngagatggtnnctaacgganntttttttttttttttttttttttttttttt

SEQ ID NO: 6529 - DNA, 84 bp, synthetic construct
  source 1..84: mol_type = other DNA
tttttttaagcagtggtatcaacgcagagtacnngagatggtnntatcgaggnntttttttttttttttttttttttttttttt

SEQ ID NO: 6530 - DNA, 84 bp, synthetic construct
  source 1..84: mol_type = other DNA
tttttttaagcagtggtatcaacgcagagtacnngagatggtnncatagcctnntttttttttttttttttttttttttttttt

SEQ ID NO: 6531 - DNA, 84 bp, synthetic construct
  source 1..84: mol_type = other DNA
tttttttaagcagtggtatcaacgcagagtacnngagatggtnnatcgagacnntttttttttttttttttttttttttttttt

SEQ ID NO: 6532 - DNA, 84 bp, synthetic construct
  source 1..84: mol_type = other DNA
tttttttaagcagtggtatcaacgcagagtacnngagatggtnnggaagagtnntttttttttttttttttttttttttttttt

SEQ ID NO: 6533 - DNA, 84 bp, synthetic construct
  source 1..84: mol_type = other DNA
tttttttaagcagtggtatcaacgcagagtacnngagatggtnnccaagtagnntttttttttttttttttttttttttttttt

SEQ ID NO: 6534 - DNA, 84 bp, synthetic construct
  source 1..84: mol_type = other DNA
tttttttaagcagtggtatcaacgcagagtacnngagatggtnnctgaacagnntttttttttttttttttttttttttttttt

SEQ ID NO: 6535 - DNA, 84 bp, synthetic construct
  source 1..84: mol_type = other DNA
tttttttaagcagtggtatcaacgcagagtacnngagatggtnngtaggttcnntttttttttttttttttttttttttttttt

SEQ ID NO: 6536 - DNA, 84 bp, synthetic construct
  source 1..84: mol_type = other DNA
tttttttaagcagtggtatcaacgcagagtacnngagatggtnngtatggacnntttttttttttttttttttttttttttttt

SEQ ID NO: 6537 - DNA, 84 bp, synthetic construct
  source 1..84: mol_type = other DNA
tttttttaagcagtggtatcaacgcagagtacnngagatggtnntcgcaacanntttttttttttttttttttttttttttttt

SEQ ID NO: 6538 - DNA, 84 bp, synthetic construct
  source 1..84: mol_type = other DNA
tttttttaagcagtggtatcaacgcagagtacnngagatggtnnccgctaatnntttttttttttttttttttttttttttttt

SEQ ID NO: 6539 - DNA, 84 bp, synthetic construct
  source 1..84: mol_type = other DNA
tttttttaagcagtggtatcaacgcagagtacnngagatggtnngattcgcanntttttttttttttttttttttttttttttt

SEQ ID NO: 6540 - DNA, 84 bp, synthetic construct
  source 1..84: mol_type = other DNA
tttttttaagcagtggtatcaacgcagagtacnngagatggtnncgatggaanntttttttttttttttttttttttttttttt

SEQ ID NO: 6541 - DNA, 84 bp, synthetic construct
  source 1..84: mol_type = other DNA
tttttttaagcagtggtatcaacgcagagtacnngagatggtnnagcaagganntttttttttttttttttttttttttttttt

SEQ ID NO: 6542 - DNA, 84 bp, synthetic construct
  source 1..84: mol_type = other DNA
tttttttaagcagtggtatcaacgcagagtacnngagatggtnncgtagcaanntttttttttttttttttttttttttttttt

SEQ ID NO: 6543 - DNA, 84 bp, synthetic construct
  source 1..84: mol_type = other DNA
tttttttaagcagtggtatcaacgcagagtacnngagatggtnntggcagtanntttttttttttttttttttttttttttttt

SEQ ID NO: 6544 - DNA, 84 bp, synthetic construct
  source 1..84: mol_type = other DNA
tttttttaagcagtggtatcaacgcagagtacnngagatggtnncggtagttnntttttttttttttttttttttttttttttt

SEQ ID NO: 6545 - DNA, 84 bp, synthetic construct
  source 1..84: mol_type = other DNA
tttttttaagcagtggtatcaacgcagagtacnngagatggtnntgacttcgnntttttttttttttttttttttttttttttt

SEQ ID NO: 6546 - DNA, 84 bp, synthetic construct
  source 1..84: mol_type = other DNA
tttttttaagcagtggtatcaacgcagagtacnngagatggtnngagtgcaanntttttttttttttttttttttttttttttt

SEQ ID NO: 6547 - DNA, 84 bp, synthetic construct
  source 1..84: mol_type = other DNA
tttttttaagcagtggtatcaacgcagagtacnngagatggtnnacggtaacnntttttttttttttttttttttttttttttt

SEQ ID NO: 6548 - DNA, 84 bp, synthetic construct
  source 1..84: mol_type = other DNA
tttttttaagcagtggtatcaacgcagagtacnngagatggtnnaagtggtgnntttttttttttttttttttttttttttttt

SEQ ID NO: 6549 - DNA, 84 bp, synthetic construct
  source 1..84: mol_type = other DNA
tttttttaagcagtggtatcaacgcagagtacnngagatggtnnggagacaanntttttttttttttttttttttttttttttt

SEQ ID NO: 6550 - DNA, 84 bp, synthetic construct
  source 1..84: mol_type = other DNA
tttttttaagcagtggtatcaacgcagagtacnngagatggtnntcaaggacnntttttttttttttttttttttttttttttt

SEQ ID NO: 6551 - DNA, 84 bp, synthetic construct
  source 1..84: mol_type = other DNA
tttttttaagcagtggtatcaacgcagagtacnngagatggtnnaagagagcnntttttttttttttttttttttttttttttt

SEQ ID NO: 6552 - DNA, 84 bp, synthetic construct
  source 1..84: mol_type = other DNA
tttttttaagcagtggtatcaacgcagagtacnngagatggtnncgagagatnntttttttttttttttttttttttttttttt

SEQ ID NO: 6553 - DNA, 84 bp, synthetic construct
  source 1..84: mol_type = other DNA
tttttttaagcagtggtatcaacgcagagtacnngagatggtnnacagatggnntttttttttttttttttttttttttttttt

SEQ ID NO: 6554 - DNA, 84 bp, synthetic construct
  source 1..84: mol_type = other DNA
tttttttaagcagtggtatcaacgcagagtacnngagatggtnnaggagtcanntttttttttttttttttttttttttttttt

SEQ ID NO: 6555 - DNA, 84 bp, synthetic construct
  source 1..84: mol_type = other DNA
tttttttaagcagtggtatcaacgcagagtacnngagatggtnncgtgttacnntttttttttttttttttttttttttttttt

SEQ ID NO: 6556 - DNA, 84 bp, synthetic construct
  source 1..84: mol_type = other DNA
tttttttaagcagtggtatcaacgcagagtacnngagatggtnntagtgtgcnntttttttttttttttttttttttttttttt

SEQ ID NO: 6557 - DNA, 84 bp, synthetic construct
  source 1..84: mol_type = other DNA
tttttttaagcagtggtatcaacgcagagtacnngagatggtnnctcatgacnntttttttttttttttttttttttttttttt

SEQ ID NO: 6558 - DNA, 84 bp, synthetic construct
  source 1..84: mol_type = other DNA
tttttttaagcagtggtatcaacgcagagtacnngagatggtnngtatccagnntttttttttttttttttttttttttttttt

SEQ ID NO: 6559 - DNA, 84 bp, synthetic construct
  source 1..84: mol_type = other DNA
tttttttaagcagtggtatcaacgcagagtacnngagatggtnnacgcctatnntttttttttttttttttttttttttttttt

SEQ ID NO: 6560 - DNA, 84 bp, synthetic construct
  source 1..84: mol_type = other DNA
tttttttaagcagtggtatcaacgcagagtacnngagatggtnnaacgacctnntttttttttttttttttttttttttttttt

SEQ ID NO: 6561 - DNA, 84 bp, synthetic construct
  source 1..84: mol_type = other DNA
tttttttaagcagtggtatcaacgcagagtacnngagatggtnnatcaggctnntttttttttttttttttttttttttttttt

SEQ ID NO: 6562 - DNA, 84 bp, synthetic construct
  source 1..84: mol_type = other DNA
tttttttaagcagtggtatcaacgcagagtacnngagatggtnncaagttcgnntttttttttttttttttttttttttttttt

SEQ ID NO: 6563 - DNA, 84 bp, synthetic construct
  source 1..84: mol_type = other DNA
tttttttaagcagtggtatcaacgcagagtacnngagatggtnntagccaganntttttttttttttttttttttttttttttt

SEQ ID NO: 6564 - DNA, 84 bp, synthetic construct
  source 1..84: mol_type = other DNA
tttttttaagcagtggtatcaacgcagagtacnngagatggtnncaatcacgnntttttttttttttttttttttttttttttt

SEQ ID NO: 6565 - DNA, 84 bp, synthetic construct
  source 1..84: mol_type = other DNA
tttttttaagcagtggtatcaacgcagagtacnngagatggtnngcaacaagnntttttttttttttttttttttttttttttt

SEQ ID NO: 6566 - DNA, 84 bp, synthetic construct
  source 1..84: mol_type = other DNA
tttttttaagcagtggtatcaacgcagagtacnngagatggtnncacgacaanntttttttttttttttttttttttttttttt

SEQ ID NO: 6567 - DNA, 84 bp, synthetic construct
  source 1..84: mol_type = other DNA
tttttttaagcagtggtatcaacgcagagtacnngagatggtnntacggaganntttttttttttttttttttttttttttttt

SEQ ID NO: 6568 - DNA, 84 bp, synthetic construct
  source 1..84: mol_type = other DNA
tttttttaagcagtggtatcaacgcagagtacnngagatggtnncgacaaganntttttttttttttttttttttttttttttt

SEQ ID NO: 6569 - DNA, 84 bp, synthetic construct
  source 1..84: mol_type = other DNA
tttttttaagcagtggtatcaacgcagagtacnngagatggtnncgaagtganntttttttttttttttttttttttttttttt

SEQ ID NO: 6570 - DNA, 84 bp, synthetic construct
  source 1..84: mol_type = other DNA
tttttttaagcagtggtatcaacgcagagtacnngagatggtnnagctggtanntttttttttttttttttttttttttttttt

SEQ ID NO: 6571 - DNA, 84 bp, synthetic construct
  source 1..84: mol_type = other DNA
tttttttaagcagtggtatcaacgcagagtacnngagatggtnnaactaggcnntttttttttttttttttttttttttttttt

SEQ ID NO: 6572 - DNA, 84 bp, synthetic construct
  source 1..84: mol_type = other DNA
tttttttaagcagtggtatcaacgcagagtacnngagatggtnncagcaagtnntttttttttttttttttttttttttttttt

SEQ ID NO: 6573 - DNA, 84 bp, synthetic construct
  source 1..84: mol_type = other DNA
tttttttaagcagtggtatcaacgcagagtacnngagatggtnnacgaggtanntttttttttttttttttttttttttttttt

SEQ ID NO: 6574 - DNA, 84 bp, synthetic construct
  source 1..84: mol_type = other DNA
tttttttaagcagtggtatcaacgcagagtacnngagatggtnncatcttccnntttttttttttttttttttttttttttttt

SEQ ID NO: 6575 - DNA, 84 bp, synthetic construct
  source 1..84: mol_type = other DNA
tttttttaagcagtggtatcaacgcagagtacnngagatggtnncctgaatcnntttttttttttttttttttttttttttttt

SEQ ID NO: 6576 - DNA, 84 bp, synthetic construct
  source 1..84: mol_type = other DNA
tttttttaagcagtggtatcaacgcagagtacnngagatggtnntgcagactnntttttttttttttttttttttttttttttt

SEQ ID NO: 6577 - DNA, 84 bp, synthetic construct
  source 1..84: mol_type = other DNA
tttttttaagcagtggtatcaacgcagagtacnngagatggtnnagatgtggnntttttttttttttttttttttttttttttt

SEQ ID NO: 6578 - DNA, 84 bp, synthetic construct
  source 1..84: mol_type = other DNA
tttttttaagcagtggtatcaacgcagagtacnngagatggtnnagttcgacnntttttttttttttttttttttttttttttt

SEQ ID NO: 6579 - DNA, 84 bp, synthetic construct
  source 1..84: mol_type = other DNA
tttttttaagcagtggtatcaacgcagagtacnngagatggtnnacaacctcnntttttttttttttttttttttttttttttt

SEQ ID NO: 6580 - DNA, 84 bp, synthetic construct
  source 1..84: mol_type = other DNA
tttttttaagcagtggtatcaacgcagagtacnngagatggtnncatggtagnntttttttttttttttttttttttttttttt

SEQ ID NO: 6581 - DNA, 84 bp, synthetic construct
  source 1..84: mol_type = other DNA
tttttttaagcagtggtatcaacgcagagtacnngagatggtnncgtatctcnntttttttttttttttttttttttttttttt

SEQ ID NO: 6582 - DNA, 84 bp, synthetic construct
  source 1..84: mol_type = other DNA
tttttttaagcagtggtatcaacgcagagtacnngagatggtnncctagttcnntttttttttttttttttttttttttttttt

SEQ ID NO: 6583 - DNA, 84 bp, synthetic construct
  source 1..84: mol_type = other DNA
tttttttaagcagtggtatcaacgcagagtacnngagatggtnncaagagtcnntttttttttttttttttttttttttttttt

SEQ ID NO: 6584 - DNA, 84 bp, synthetic construct
  source 1..84: mol_type = other DNA
tttttttaagcagtggtatcaacgcagagtacnngaagtaggnnaatcggcanntttttttttttttttttttttttttttttt

SEQ ID NO: 6585 - DNA, 84 bp, synthetic construct
  source 1..84: mol_type = other DNA
tttttttaagcagtggtatcaacgcagagtacnngaagtaggnntacggcatnntttttttttttttttttttttttttttttt

SEQ ID NO: 6586 - DNA, 84 bp, synthetic construct
  source 1..84: mol_type = other DNA
tttttttaagcagtggtatcaacgcagagtacnngaagtaggnnttggatcgnntttttttttttttttttttttttttttttt

SEQ ID NO: 6587 - DNA, 84 bp, synthetic construct
  source 1..84: mol_type = other DNA
tttttttaagcagtggtatcaacgcagagtacnngaagtaggnntggaacganntttttttttttttttttttttttttttttt

SEQ ID NO: 6588 - DNA, 84 bp, synthetic construct
  source 1..84: mol_type = other DNA
tttttttaagcagtggtatcaacgcagagtacnngaagtaggnnggcaatcanntttttttttttttttttttttttttttttt

SEQ ID NO: 6589 - DNA, 84 bp, synthetic construct
  source 1..84: mol_type = other DNA
tttttttaagcagtggtatcaacgcagagtacnngaagtaggnngaatccganntttttttttttttttttttttttttttttt

SEQ ID NO: 6590 - DNA, 84 bp, synthetic construct
  source 1..84: mol_type = other DNA
tttttttaagcagtggtatcaacgcagagtacnngaagtaggnnttacggtgnntttttttttttttttttttttttttttttt

SEQ ID NO: 6591 - DNA, 84 bp, synthetic construct
  source 1..84: mol_type = other DNA
tttttttaagcagtggtatcaacgcagagtacnngaagtaggnncatatcggnntttttttttttttttttttttttttttttt

SEQ ID NO: 6592 - DNA, 84 bp, synthetic construct
  source 1..84: mol_type = other DNA
tttttttaagcagtggtatcaacgcagagtacnngaagtaggnncttcggtanntttttttttttttttttttttttttttttt

SEQ ID NO: 6593 - DNA, 84 bp, synthetic construct
  source 1..84: mol_type = other DNA
tttttttaagcagtggtatcaacgcagagtacnngaagtaggnntcctaacgnntttttttttttttttttttttttttttttt

SEQ ID NO: 6594 - DNA, 84 bp, synthetic construct
  source 1..84: mol_type = other DNA
tttttttaagcagtggtatcaacgcagagtacnngaagtaggnngtaagccanntttttttttttttttttttttttttttttt

SEQ ID NO: 6595 - DNA, 84 bp, synthetic construct
  source 1..84: mol_type = other DNA
tttttttaagcagtggtatcaacgcagagtacnngaagtaggnntaaggtggnntttttttttttttttttttttttttttttt

SEQ ID NO: 6596 - DNA, 84 bp, synthetic construct
  source 1..84: mol_type = other DNA
tttttttaagcagtggtatcaacgcagagtacnngaagtaggnnggtaagctnntttttttttttttttttttttttttttttt

SEQ ID NO: 6597 - DNA, 84 bp, synthetic construct
  source 1..84: mol_type = other DNA
tttttttaagcagtggtatcaacgcagagtacnngaagtaggnntgtgtcganntttttttttttttttttttttttttttttt

SEQ ID NO: 6598 - DNA, 84 bp, synthetic construct
  source 1..84: mol_type = other DNA
tttttttaagcagtggtatcaacgcagagtacnngaagtaggnngagcatganntttttttttttttttttttttttttttttt

SEQ ID NO: 6599 - DNA, 84 bp, synthetic construct
  source 1..84: mol_type = other DNA
tttttttaagcagtggtatcaacgcagagtacnngaagtaggnntcgaagtcnntttttttttttttttttttttttttttttt

SEQ ID NO: 6600 - DNA, 84 bp, synthetic construct
  source 1..84: mol_type = other DNA
tttttttaagcagtggtatcaacgcagagtacnngaagtaggnnggtgaacanntttttttttttttttttttttttttttttt

SEQ ID NO: 6601 - DNA, 84 bp, synthetic construct
  source 1..84: mol_type = other DNA
tttttttaagcagtggtatcaacgcagagtacnngaagtaggnnacatgcacnntttttttttttttttttttttttttttttt

SEQ ID NO: 6602 - DNA, 84 bp, synthetic construct
  source 1..84: mol_type = other DNA
tttttttaagcagtggtatcaacgcagagtacnngaagtaggnnccaacagtnntttttttttttttttttttttttttttttt

SEQ ID NO: 6603 - DNA, 84 bp, synthetic construct
  source 1..84: mol_type = other DNA
tttttttaagcagtggtatcaacgcagagtacnngaagtaggnnagaacagcnntttttttttttttttttttttttttttttt

SEQ ID NO: 6604 - DNA, 84 bp, synthetic construct
  source 1..84: mol_type = other DNA
tttttttaagcagtggtatcaacgcagagtacnngaagtaggnngaacacgtnntttttttttttttttttttttttttttttt

SEQ ID NO: 6605 - DNA, 84 bp, synthetic construct
  source 1..84: mol_type = other DNA
tttttttaagcagtggtatcaacgcagagtacnngaagtaggnnggtcttcanntttttttttttttttttttttttttttttt

SEQ ID NO: 6606 - DNA, 84 bp, synthetic construct
  source 1..84: mol_type = other DNA
tttttttaagcagtggtatcaacgcagagtacnngaagtaggnnaggttcagnntttttttttttttttttttttttttttttt

SEQ ID NO: 6607 - DNA, 84 bp, synthetic construct
  source 1..84: mol_type = other DNA
tttttttaagcagtggtatcaacgcagagtacnngaagtaggnnctagagcanntttttttttttttttttttttttttttttt

SEQ ID NO: 6608 - DNA, 84 bp, synthetic construct
  source 1..84: mol_type = other DNA
tttttttaagcagtggtatcaacgcagagtacnngaagtaggnncttctagcnntttttttttttttttttttttttttttttt

SEQ ID NO: 6609 - DNA, 84 bp, synthetic construct
  source 1..84: mol_type = other DNA
tttttttaagcagtggtatcaacgcagagtacnngaagtaggnngagtaacgnntttttttttttttttttttttttttttttt

SEQ ID NO: 6610 - DNA, 84 bp, synthetic construct
  source 1..84: mol_type = other DNA
tttttttaagcagtggtatcaacgcagagtacnngaagtaggnnctaagaggnntttttttttttttttttttttttttttttt

SEQ ID NO: 6611 - DNA, 84 bp, synthetic construct
  source 1..84: mol_type = other DNA
tttttttaagcagtggtatcaacgcagagtacnngaagtaggnnacgtgtagnntttttttttttttttttttttttttttttt

SEQ ID NO: 6612 - DNA, 84 bp, synthetic construct
  source 1..84: mol_type = other DNA
tttttttaagcagtggtatcaacgcagagtacnngaagtaggnnactacaggnntttttttttttttttttttttttttttttt

SEQ ID NO: 6613 - DNA, 84 bp, synthetic construct
  source 1..84: mol_type = other DNA
tttttttaagcagtggtatcaacgcagagtacnngaagtaggnntacaggtcnntttttttttttttttttttttttttttttt

SEQ ID NO: 6614 - DNA, 84 bp, synthetic construct
  source 1..84: mol_type = other DNA
tttttttaagcagtggtatcaacgcagagtacnngaagtaggnnctcacatgnntttttttttttttttttttttttttttttt

SEQ ID NO: 6615 - DNA, 84 bp, synthetic construct
  source 1..84: mol_type = other DNA
tttttttaagcagtggtatcaacgcagagtacnngaagtaggnnactaggagnntttttttttttttttttttttttttttttt

SEQ ID NO: 6616 - DNA, 84 bp, synthetic construct
  source 1..84: mol_type = other DNA
tttttttaagcagtggtatcaacgcagagtacnngaagtaggnnccatagganntttttttttttttttttttttttttttttt

SEQ ID NO: 6617 - DNA, 84 bp, synthetic construct
  source 1..84: mol_type = other DNA
tttttttaagcagtggtatcaacgcagagtacnngaagtaggnnggagaatcnntttttttttttttttttttttttttttttt

SEQ ID NO: 6618 - DNA, 84 bp, synthetic construct
  source 1..84: mol_type = other DNA
tttttttaagcagtggtatcaacgcagagtacnngaagtaggnngccaagaanntttttttttttttttttttttttttttttt

SEQ ID NO: 6619 - DNA, 84 bp, synthetic construct
  source 1..84: mol_type = other DNA
tttttttaagcagtggtatcaacgcagagtacnngaagtaggnnaaggcaagnntttttttttttttttttttttttttttttt

SEQ ID NO: 6620 - DNA, 84 bp, synthetic construct
  source 1..84: mol_type = other DNA
tttttttaagcagtggtatcaacgcagagtacnngaagtaggnnaatgtcgcnntttttttttttttttttttttttttttttt

SEQ ID NO: 6621 - DNA, 84 bp, synthetic construct
  source 1..84: mol_type = other DNA
tttttttaagcagtggtatcaacgcagagtacnngaagtaggnnatggaaccnntttttttttttttttttttttttttttttt

SEQ ID NO: 6622 - DNA, 84 bp, synthetic construct
  source 1..84: mol_type = other DNA
tttttttaagcagtggtatcaacgcagagtacnngaagtaggnnagaggcatnntttttttttttttttttttttttttttttt

SEQ ID NO: 6623 - DNA, 84 bp, synthetic construct
  source 1..84: mol_type = other DNA
tttttttaagcagtggtatcaacgcagagtacnngaagtaggnntgcatagcnntttttttttttttttttttttttttttttt

SEQ ID NO: 6624 - DNA, 84 bp, synthetic construct
  source 1..84: mol_type = other DNA
tttttttaagcagtggtatcaacgcagagtacnngaagtaggnnctaacgganntttttttttttttttttttttttttttttt

SEQ ID NO: 6625 - DNA, 84 bp, synthetic construct
  source 1..84: mol_type = other DNA
tttttttaagcagtggtatcaacgcagagtacnngaagtaggnntatcgaggnntttttttttttttttttttttttttttttt

SEQ ID NO: 6626 - DNA, 84 bp, synthetic construct
  source 1..84: mol_type = other DNA
tttttttaagcagtggtatcaacgcagagtacnngaagtaggnncatagcctnntttttttttttttttttttttttttttttt

SEQ ID NO: 6627 - DNA, 84 bp, synthetic construct
  source 1..84: mol_type = other DNA
tttttttaagcagtggtatcaacgcagagtacnngaagtaggnnatcgagacnntttttttttttttttttttttttttttttt

SEQ ID NO: 6628 - DNA, 84 bp, synthetic construct
  source 1..84: mol_type = other DNA
tttttttaagcagtggtatcaacgcagagtacnngaagtaggnnggaagagtnntttttttttttttttttttttttttttttt

SEQ ID NO: 6629 - DNA, 84 bp, synthetic construct
  source 1..84: mol_type = other DNA
tttttttaagcagtggtatcaacgcagagtacnngaagtaggnnccaagtagnntttttttttttttttttttttttttttttt

SEQ ID NO: 6630 - DNA, 84 bp, synthetic construct
  source 1..84: mol_type = other DNA
tttttttaagcagtggtatcaacgcagagtacnngaagtaggnnctgaacagnntttttttttttttttttttttttttttttt

SEQ ID NO: 6631 - DNA, 84 bp, synthetic construct
  source 1..84: mol_type = other DNA
tttttttaagcagtggtatcaacgcagagtacnngaagtaggnngtaggttcnntttttttttttttttttttttttttttttt

SEQ ID NO: 6632 - DNA, 84 bp, synthetic construct
  source 1..84: mol_type = other DNA
tttttttaagcagtggtatcaacgcagagtacnngaagtaggnngtatggacnntttttttttttttttttttttttttttttt

SEQ ID NO: 6633 - DNA, 84 bp, synthetic construct
  source 1..84: mol_type = other DNA
tttttttaagcagtggtatcaacgcagagtacnngaagtaggnntcgcaacanntttttttttttttttttttttttttttttt

SEQ ID NO: 6634 - DNA, 84 bp, synthetic construct
  source 1..84: mol_type = other DNA
tttttttaagcagtggtatcaacgcagagtacnngaagtaggnnccgctaatnntttttttttttttttttttttttttttttt

SEQ ID NO: 6635 - DNA, 84 bp, synthetic construct
  source 1..84: mol_type = other DNA
tttttttaagcagtggtatcaacgcagagtacnngaagtaggnngattcgcanntttttttttttttttttttttttttttttt

SEQ ID NO: 6636 - DNA, 84 bp, synthetic construct
  source 1..84: mol_type = other DNA
tttttttaagcagtggtatcaacgcagagtacnngaagtaggnncgatggaanntttttttttttttttttttttttttttttt

SEQ ID NO: 6637 - DNA, 84 bp, synthetic construct
  source 1..84: mol_type = other DNA
tttttttaagcagtggtatcaacgcagagtacnngaagtaggnnagcaagganntttttttttttttttttttttttttttttt

SEQ ID NO: 6638 - DNA, 84 bp, synthetic construct
  source 1..84: mol_type = other DNA
tttttttaagcagtggtatcaacgcagagtacnngaagtaggnncgtagcaanntttttttttttttttttttttttttttttt

SEQ ID NO: 6639 - DNA, 84 bp, synthetic construct
  source 1..84: mol_type = other DNA
tttttttaagcagtggtatcaacgcagagtacnngaagtaggnntggcagtanntttttttttttttttttttttttttttttt

SEQ ID NO: 6640 - DNA, 84 bp, synthetic construct
  source 1..84: mol_type = other DNA
tttttttaagcagtggtatcaacgcagagtacnngaagtaggnncggtagttnntttttttttttttttttttttttttttttt

SEQ ID NO: 6641 - DNA, 84 bp, synthetic construct
  source 1..84: mol_type = other DNA
tttttttaagcagtggtatcaacgcagagtacnngaagtaggnntgacttcgnntttttttttttttttttttttttttttttt

SEQ ID NO: 6642 - DNA, 84 bp, synthetic construct
  source 1..84: mol_type = other DNA
tttttttaagcagtggtatcaacgcagagtacnngaagtaggnngagtgcaanntttttttttttttttttttttttttttttt

SEQ ID NO: 6643 - DNA, 84 bp, synthetic construct
  source 1..84: mol_type = other DNA
tttttttaagcagtggtatcaacgcagagtacnngaagtaggnnacggtaacnntttttttttttttttttttttttttttttt

SEQ ID NO: 6644 - DNA, 84 bp, synthetic construct
  source 1..84: mol_type = other DNA
tttttttaagcagtggtatcaacgcagagtacnngaagtaggnnaagtggtgnntttttttttttttttttttttttttttttt

SEQ ID NO: 6645 - DNA, 84 bp, synthetic construct
  source 1..84: mol_type = other DNA
tttttttaagcagtggtatcaacgcagagtacnngaagtaggnnggagacaanntttttttttttttttttttttttttttttt

SEQ ID NO: 6646 - DNA, 84 bp, synthetic construct
  source 1..84: mol_type = other DNA
tttttttaagcagtggtatcaacgcagagtacnngaagtaggnntcaaggacnntttttttttttttttttttttttttttttt

SEQ ID NO: 6647 - DNA, 84 bp, synthetic construct
  source 1..84: mol_type = other DNA
tttttttaagcagtggtatcaacgcagagtacnngaagtaggnnaagagagcnntttttttttttttttttttttttttttttt

SEQ ID NO: 6648 - DNA, 84 bp, synthetic construct
  source 1..84: mol_type = other DNA
tttttttaagcagtggtatcaacgcagagtacnngaagtaggnncgagagatnntttttttttttttttttttttttttttttt

SEQ ID NO: 6649 - DNA, 84 bp, synthetic construct
  source 1..84: mol_type = other DNA
tttttttaagcagtggtatcaacgcagagtacnngaagtaggnnacagatggnntttttttttttttttttttttttttttttt

SEQ ID NO: 6650 - DNA, 84 bp, synthetic construct
  source 1..84: mol_type = other DNA
tttttttaagcagtggtatcaacgcagagtacnngaagtaggnnaggagtcanntttttttttttttttttttttttttttttt

SEQ ID NO: 6651 - DNA, 84 bp, synthetic construct
  source 1..84: mol_type = other DNA
tttttttaagcagtggtatcaacgcagagtacnngaagtaggnncgtgttacnntttttttttttttttttttttttttttttt

SEQ ID NO: 6652 - DNA, 84 bp, synthetic construct
  source 1..84: mol_type = other DNA
tttttttaagcagtggtatcaacgcagagtacnngaagtaggnntagtgtgcnntttttttttttttttttttttttttttttt

SEQ ID NO: 6653 - DNA, 84 bp, synthetic construct
  source 1..84: mol_type = other DNA
tttttttaagcagtggtatcaacgcagagtacnngaagtaggnnctcatgacnntttttttttttttttttttttttttttttt

SEQ ID NO: 6654 - DNA, 84 bp, synthetic construct
  source 1..84: mol_type = other DNA
tttttttaagcagtggtatcaacgcagagtacnngaagtaggnngtatccagnntttttttttttttttttttttttttttttt

SEQ ID NO: 6655 - DNA, 84 bp, synthetic construct
  source 1..84: mol_type = other DNA
tttttttaagcagtggtatcaacgcagagtacnngaagtaggnnacgcctatnntttttttttttttttttttttttttttttt

SEQ ID NO: 6656 - DNA, 84 bp, synthetic construct
  source 1..84: mol_type = other DNA
tttttttaagcagtggtatcaacgcagagtacnngaagtaggnnaacgacctnntttttttttttttttttttttttttttttt

SEQ ID NO: 6657 - DNA, 84 bp, synthetic construct
  source 1..84: mol_type = other DNA
tttttttaagcagtggtatcaacgcagagtacnngaagtaggnnatcaggctnntttttttttttttttttttttttttttttt

SEQ ID NO: 6658 - DNA, 84 bp, synthetic construct
  source 1..84: mol_type = other DNA
tttttttaagcagtggtatcaacgcagagtacnngaagtaggnncaagttcgnntttttttttttttttttttttttttttttt

SEQ ID NO: 6659 - DNA, 84 bp, synthetic construct
  source 1..84: mol_type = other DNA
tttttttaagcagtggtatcaacgcagagtacnngaagtaggnntagccaganntttttttttttttttttttttttttttttt

SEQ ID NO: 6660 - DNA, 84 bp, synthetic construct
  source 1..84: mol_type = other DNA
tttttttaagcagtggtatcaacgcagagtacnngaagtaggnncaatcacgnntttttttttttttttttttttttttttttt

SEQ ID NO: 6661 - DNA, 84 bp, synthetic construct
  source 1..84: mol_type = other DNA
tttttttaagcagtggtatcaacgcagagtacnngaagtaggnngcaacaagnntttttttttttttttttttttttttttttt

SEQ ID NO: 6662 - DNA, 84 bp, synthetic construct
  source 1..84: mol_type = other DNA
tttttttaagcagtggtatcaacgcagagtacnngaagtaggnncacgacaanntttttttttttttttttttttttttttttt

SEQ ID NO: 6663 - DNA, 84 bp, synthetic construct
  source 1..84: mol_type = other DNA
tttttttaagcagtggtatcaacgcagagtacnngaagtaggnntacggaganntttttttttttttttttttttttttttttt

SEQ ID NO: 6664 - DNA, 84 bp, synthetic construct
  source 1..84: mol_type = other DNA
tttttttaagcagtggtatcaacgcagagtacnngaagtaggnncgacaaganntttttttttttttttttttttttttttttt

SEQ ID NO: 6665 - DNA, 84 bp, synthetic construct
  source 1..84: mol_type = other DNA
tttttttaagcagtggtatcaacgcagagtacnngaagtaggnncgaagtganntttttttttttttttttttttttttttttt

SEQ ID NO: 6666 - DNA, 84 bp, synthetic construct
  source 1..84: mol_type = other DNA
tttttttaagcagtggtatcaacgcagagtacnngaagtaggnnagctggtanntttttttttttttttttttttttttttttt

SEQ ID NO: 6667 - DNA, 84 bp, synthetic construct
  source 1..84: mol_type = other DNA
tttttttaagcagtggtatcaacgcagagtacnngaagtaggnnaactaggcnntttttttttttttttttttttttttttttt

SEQ ID NO: 6668 - DNA, 84 bp, synthetic construct
  source 1..84: mol_type = other DNA
tttttttaagcagtggtatcaacgcagagtacnngaagtaggnncagcaagtnntttttttttttttttttttttttttttttt

SEQ ID NO: 6669 - DNA, 84 bp, synthetic construct
  source 1..84: mol_type = other DNA
tttttttaagcagtggtatcaacgcagagtacnngaagtaggnnacgaggtanntttttttttttttttttttttttttttttt

SEQ ID NO: 6670 - DNA, 84 bp, synthetic construct
  source 1..84: mol_type = other DNA
tttttttaagcagtggtatcaacgcagagtacnngaagtaggnncatcttccnntttttttttttttttttttttttttttttt

SEQ ID NO: 6671 - DNA, 84 bp, synthetic construct
  source 1..84: mol_type = other DNA
tttttttaagcagtggtatcaacgcagagtacnngaagtaggnncctgaatcnntttttttttttttttttttttttttttttt

SEQ ID NO: 6672 - DNA, 84 bp, synthetic construct
  source 1..84: mol_type = other DNA
tttttttaagcagtggtatcaacgcagagtacnngaagtaggnntgcagactnntttttttttttttttttttttttttttttt

SEQ ID NO: 6673 - DNA, 84 bp, synthetic construct
  source 1..84: mol_type = other DNA
tttttttaagcagtggtatcaacgcagagtacnngaagtaggnnagatgtggnntttttttttttttttttttttttttttttt

SEQ ID NO: 6674 - DNA, 84 bp, synthetic construct
  source 1..84: mol_type = other DNA
tttttttaagcagtggtatcaacgcagagtacnngaagtaggnnagttcgacnntttttttttttttttttttttttttttttt

SEQ ID NO: 6675 - DNA, 84 bp, synthetic construct
  source 1..84: mol_type = other DNA
tttttttaagcagtggtatcaacgcagagtacnngaagtaggnnacaacctcnntttttttttttttttttttttttttttttt

SEQ ID NO: 6676 - DNA, 84 bp, synthetic construct
  source 1..84: mol_type = other DNA
tttttttaagcagtggtatcaacgcagagtacnngaagtaggnncatggtagnntttttttttttttttttttttttttttttt

SEQ ID NO: 6677 - DNA, 84 bp, synthetic construct
  source 1..84: mol_type = other DNA
tttttttaagcagtggtatcaacgcagagtacnngaagtaggnncgtatctcnntttttttttttttttttttttttttttttt

SEQ ID NO: 6678 - DNA, 84 bp, synthetic construct
  source 1..84: mol_type = other DNA
tttttttaagcagtggtatcaacgcagagtacnngaagtaggnncctagttcnntttttttttttttttttttttttttttttt

SEQ ID NO: 6679 - DNA, 84 bp, synthetic construct
  source 1..84: mol_type = other DNA
tttttttaagcagtggtatcaacgcagagtacnngaagtaggnncaagagtcnntttttttttttttttttttttttttttttt

SEQ ID NO: 6680 - DNA, 84 bp, synthetic construct
  source 1..84: mol_type = other DNA
tttttttaagcagtggtatcaacgcagagtacnncggcatatnnaatcggcanntttttttttttttttttttttttttttttt

SEQ ID NO: 6681 - DNA, 84 bp, synthetic construct
  source 1..84: mol_type = other DNA
tttttttaagcagtggtatcaacgcagagtacnncggcatatnntacggcatnntttttttttttttttttttttttttttttt

SEQ ID NO: 6682 - DNA, 84 bp, synthetic construct
  source 1..84: mol_type = other DNA
tttttttaagcagtggtatcaacgcagagtacnncggcatatnnttggatcgnntttttttttttttttttttttttttttttt

SEQ ID NO: 6683 - DNA, 84 bp, synthetic construct
  source 1..84: mol_type = other DNA
tttttttaagcagtggtatcaacgcagagtacnncggcatatnntggaacganntttttttttttttttttttttttttttttt

SEQ ID NO: 6684 - DNA, 84 bp, synthetic construct
  source 1..84: mol_type = other DNA
tttttttaagcagtggtatcaacgcagagtacnncggcatatnnggcaatcanntttttttttttttttttttttttttttttt

SEQ ID NO: 6685 - DNA, 84 bp, synthetic construct
  source 1..84: mol_type = other DNA
tttttttaagcagtggtatcaacgcagagtacnncggcatatnngaatccganntttttttttttttttttttttttttttttt

SEQ ID NO: 6686 - DNA, 84 bp, synthetic construct
  source 1..84: mol_type = other DNA
tttttttaagcagtggtatcaacgcagagtacnncggcatatnnttacggtgnntttttttttttttttttttttttttttttt

SEQ ID NO: 6687 - DNA, 84 bp, synthetic construct
  source 1..84: mol_type = other DNA
tttttttaagcagtggtatcaacgcagagtacnncggcatatnncatatcggnntttttttttttttttttttttttttttttt

SEQ ID NO: 6688 - DNA, 84 bp, synthetic construct
  source 1..84: mol_type = other DNA
tttttttaagcagtggtatcaacgcagagtacnncggcatatnncttcggtanntttttttttttttttttttttttttttttt

SEQ ID NO: 6689 - DNA, 84 bp, synthetic construct
  source 1..84: mol_type = other DNA
tttttttaagcagtggtatcaacgcagagtacnncggcatatnntcctaacgnntttttttttttttttttttttttttttttt

SEQ ID NO: 6690 - DNA, 84 bp, synthetic construct
  source 1..84: mol_type = other DNA
tttttttaagcagtggtatcaacgcagagtacnncggcatatnngtaagccanntttttttttttttttttttttttttttttt

SEQ ID NO: 6691 - DNA, 84 bp, synthetic construct
  source 1..84: mol_type = other DNA
tttttttaagcagtggtatcaacgcagagtacnncggcatatnntaaggtggnntttttttttttttttttttttttttttttt

SEQ ID NO: 6692 - DNA, 84 bp, synthetic construct
  source 1..84: mol_type = other DNA
tttttttaagcagtggtatcaacgcagagtacnncggcatatnnggtaagctnntttttttttttttttttttttttttttttt

SEQ ID NO: 6693 - DNA, 84 bp, synthetic construct
  source 1..84: mol_type = other DNA
tttttttaagcagtggtatcaacgcagagtacnncggcatatnntgtgtcganntttttttttttttttttttttttttttttt

SEQ ID NO: 6694 - DNA, 84 bp, synthetic construct
  source 1..84: mol_type = other DNA
tttttttaagcagtggtatcaacgcagagtacnncggcatatnngagcatganntttttttttttttttttttttttttttttt

SEQ ID NO: 6695 - DNA, 84 bp, synthetic construct
  source 1..84: mol_type = other DNA
tttttttaagcagtggtatcaacgcagagtacnncggcatatnntcgaagtcnntttttttttttttttttttttttttttttt

SEQ ID NO: 6696 - DNA, 84 bp, synthetic construct
  source 1..84: mol_type = other DNA
tttttttaagcagtggtatcaacgcagagtacnncggcatatnnggtgaacanntttttttttttttttttttttttttttttt

SEQ ID NO: 6697 - DNA, 84 bp, synthetic construct
  source 1..84: mol_type = other DNA
tttttttaagcagtggtatcaacgcagagtacnncggcatatnnacatgcacnntttttttttttttttttttttttttttttt

SEQ ID NO: 6698 - DNA, 84 bp, synthetic construct
  source 1..84: mol_type = other DNA
tttttttaagcagtggtatcaacgcagagtacnncggcatatnnccaacagtnntttttttttttttttttttttttttttttt

SEQ ID NO: 6699 - DNA, 84 bp, synthetic construct
  source 1..84: mol_type = other DNA
tttttttaagcagtggtatcaacgcagagtacnncggcatatnnagaacagcnntttttttttttttttttttttttttttttt

SEQ ID NO: 6700 - DNA, 84 bp, synthetic construct
  source 1..84: mol_type = other DNA
tttttttaagcagtggtatcaacgcagagtacnncggcatatnngaacacgtnntttttttttttttttttttttttttttttt

SEQ ID NO: 6701 - DNA, 84 bp, synthetic construct
  source 1..84: mol_type = other DNA
tttttttaagcagtggtatcaacgcagagtacnncggcatatnnggtcttcanntttttttttttttttttttttttttttttt

SEQ ID NO: 6702 - DNA, 84 bp, synthetic construct
  source 1..84: mol_type = other DNA
tttttttaagcagtggtatcaacgcagagtacnncggcatatnnaggttcagnntttttttttttttttttttttttttttttt

SEQ ID NO: 6703 - DNA, 84 bp, synthetic construct
  source 1..84: mol_type = other DNA
tttttttaagcagtggtatcaacgcagagtacnncggcatatnnctagagcanntttttttttttttttttttttttttttttt

SEQ ID NO: 6704 - DNA, 84 bp, synthetic construct
  source 1..84: mol_type = other DNA
tttttttaagcagtggtatcaacgcagagtacnncggcatatnncttctagcnntttttttttttttttttttttttttttttt

SEQ ID NO: 6705 - DNA, 84 bp, synthetic construct
  source 1..84: mol_type = other DNA
tttttttaagcagtggtatcaacgcagagtacnncggcatatnngagtaacgnntttttttttttttttttttttttttttttt

SEQ ID NO: 6706 - DNA, 84 bp, synthetic construct
  source 1..84: mol_type = other DNA
tttttttaagcagtggtatcaacgcagagtacnncggcatatnnctaagaggnntttttttttttttttttttttttttttttt

SEQ ID NO: 6707 - DNA, 84 bp, synthetic construct
  source 1..84: mol_type = other DNA
tttttttaagcagtggtatcaacgcagagtacnncggcatatnnacgtgtagnntttttttttttttttttttttttttttttt

SEQ ID NO: 6708 - DNA, 84 bp, synthetic construct
  source 1..84: mol_type = other DNA
tttttttaagcagtggtatcaacgcagagtacnncggcatatnnactacaggnntttttttttttttttttttttttttttttt

SEQ ID NO: 6709 - DNA, 84 bp, synthetic construct
  source 1..84: mol_type = other DNA
tttttttaagcagtggtatcaacgcagagtacnncggcatatnntacaggtcnntttttttttttttttttttttttttttttt

SEQ ID NO: 6710 - DNA, 84 bp, synthetic construct
  source 1..84: mol_type = other DNA
tttttttaagcagtggtatcaacgcagagtacnncggcatatnnctcacatgnntttttttttttttttttttttttttttttt

SEQ ID NO: 6711 - DNA, 84 bp, synthetic construct
  source 1..84: mol_type = other DNA
tttttttaagcagtggtatcaacgcagagtacnncggcatatnnactaggagnntttttttttttttttttttttttttttttt

SEQ ID NO: 6712 - DNA, 84 bp, synthetic construct
  source 1..84: mol_type = other DNA
tttttttaagcagtggtatcaacgcagagtacnncggcatatnnccatagganntttttttttttttttttttttttttttttt

SEQ ID NO: 6713 - DNA, 84 bp, synthetic construct
  source 1..84: mol_type = other DNA
tttttttaagcagtggtatcaacgcagagtacnncggcatatnnggagaatcnntttttttttttttttttttttttttttttt

SEQ ID NO: 6714 - DNA, 84 bp, synthetic construct
  source 1..84: mol_type = other DNA
tttttttaagcagtggtatcaacgcagagtacnncggcatatnngccaagaanntttttttttttttttttttttttttttttt

SEQ ID NO: 6715 - DNA, 84 bp, synthetic construct
  source 1..84: mol_type = other DNA
tttttttaagcagtggtatcaacgcagagtacnncggcatatnnaaggcaagnntttttttttttttttttttttttttttttt

SEQ ID NO: 6716 - DNA, 84 bp, synthetic construct
  source 1..84: mol_type = other DNA
tttttttaagcagtggtatcaacgcagagtacnncggcatatnnaatgtcgcnntttttttttttttttttttttttttttttt

SEQ ID NO: 6717 - DNA, 84 bp, synthetic construct
  source 1..84: mol_type = other DNA
tttttttaagcagtggtatcaacgcagagtacnncggcatatnnatggaaccnntttttttttttttttttttttttttttttt

SEQ ID NO: 6718 - DNA, 84 bp, synthetic construct
  source 1..84: mol_type = other DNA
tttttttaagcagtggtatcaacgcagagtacnncggcatatnnagaggcatnntttttttttttttttttttttttttttttt

SEQ ID NO: 6719 - DNA, 84 bp, synthetic construct
  source 1..84: mol_type = other DNA
tttttttaagcagtggtatcaacgcagagtacnncggcatatnntgcatagcnntttttttttttttttttttttttttttttt

SEQ ID NO: 6720 - DNA, 84 bp, synthetic construct
  source 1..84: mol_type = other DNA
tttttttaagcagtggtatcaacgcagagtacnncggcatatnnctaacgganntttttttttttttttttttttttttttttt

SEQ ID NO: 6721 - DNA, 84 bp, synthetic construct
  source 1..84: mol_type = other DNA
tttttttaagcagtggtatcaacgcagagtacnncggcatatnntatcgaggnntttttttttttttttttttttttttttttt

SEQ ID NO: 6722 - DNA, 84 bp, synthetic construct
  source 1..84: mol_type = other DNA
tttttttaagcagtggtatcaacgcagagtacnncggcatatnncatagcctnntttttttttttttttttttttttttttttt

SEQ ID NO: 6723 - DNA, 84 bp, synthetic construct
  source 1..84: mol_type = other DNA
tttttttaagcagtggtatcaacgcagagtacnncggcatatnnatcgagacnntttttttttttttttttttttttttttttt

SEQ ID NO: 6724 - DNA, 84 bp, synthetic construct
  source 1..84: mol_type = other DNA
tttttttaagcagtggtatcaacgcagagtacnncggcatatnnggaagagtnntttttttttttttttttttttttttttttt

SEQ ID NO: 6725 - DNA, 84 bp, synthetic construct
  source 1..84: mol_type = other DNA
tttttttaagcagtggtatcaacgcagagtacnncggcatatnnccaagtagnntttttttttttttttttttttttttttttt

SEQ ID NO: 6726 - DNA, 84 bp, synthetic construct
  source 1..84: mol_type = other DNA
tttttttaagcagtggtatcaacgcagagtacnncggcatatnnctgaacagnntttttttttttttttttttttttttttttt

SEQ ID NO: 6727 - DNA, 84 bp, synthetic construct
  source 1..84: mol_type = other DNA
tttttttaagcagtggtatcaacgcagagtacnncggcatatnngtaggttcnntttttttttttttttttttttttttttttt

SEQ ID NO: 6728 - DNA, 84 bp, synthetic construct
  source 1..84: mol_type = other DNA
tttttttaagcagtggtatcaacgcagagtacnncggcatatnngtatggacnntttttttttttttttttttttttttttttt

SEQ ID NO: 6729 - DNA, 84 bp, synthetic construct
  source 1..84: mol_type = other DNA
tttttttaagcagtggtatcaacgcagagtacnncggcatatnntcgcaacanntttttttttttttttttttttttttttttt

SEQ ID NO: 6730 - DNA, 84 bp, synthetic construct
  source 1..84: mol_type = other DNA
tttttttaagcagtggtatcaacgcagagtacnncggcatatnnccgctaatnntttttttttttttttttttttttttttttt

SEQ ID NO: 6731 - DNA, 84 bp, synthetic construct
  source 1..84: mol_type = other DNA
tttttttaagcagtggtatcaacgcagagtacnncggcatatnngattcgcanntttttttttttttttttttttttttttttt

SEQ ID NO: 6732 - DNA, 84 bp, synthetic construct
  source 1..84: mol_type = other DNA
tttttttaagcagtggtatcaacgcagagtacnncggcatatnncgatggaanntttttttttttttttttttttttttttttt

SEQ ID NO: 6733 - DNA, 84 bp, synthetic construct
  source 1..84: mol_type = other DNA
tttttttaagcagtggtatcaacgcagagtacnncggcatatnnagcaagganntttttttttttttttttttttttttttttt

SEQ ID NO: 6734 - DNA, 84 bp, synthetic construct
  source 1..84: mol_type = other DNA
tttttttaagcagtggtatcaacgcagagtacnncggcatatnncgtagcaanntttttttttttttttttttttttttttttt

SEQ ID NO: 6735 - DNA, 84 bp, synthetic construct
  source 1..84: mol_type = other DNA
tttttttaagcagtggtatcaacgcagagtacnncggcatatnntggcagtanntttttttttttttttttttttttttttttt

SEQ ID NO: 6736 - DNA, 84 bp, synthetic construct
  source 1..84: mol_type = other DNA
tttttttaagcagtggtatcaacgcagagtacnncggcatatnncggtagttnntttttttttttttttttttttttttttttt

SEQ ID NO: 6737 - DNA, 84 bp, synthetic construct
  source 1..84: mol_type = other DNA
tttttttaagcagtggtatcaacgcagagtacnncggcatatnntgacttcgnntttttttttttttttttttttttttttttt

SEQ ID NO: 6738 - DNA, 84 bp, synthetic construct
  source 1..84: mol_type = other DNA
tttttttaagcagtggtatcaacgcagagtacnncggcatatnngagtgcaanntttttttttttttttttttttttttttttt

SEQ ID NO: 6739 - DNA, 84 bp, synthetic construct
  source 1..84: mol_type = other DNA
tttttttaagcagtggtatcaacgcagagtacnncggcatatnnacggtaacnntttttttttttttttttttttttttttttt

SEQ ID NO: 6740 - DNA, 84 bp, synthetic construct
  source 1..84: mol_type = other DNA
tttttttaagcagtggtatcaacgcagagtacnncggcatatnnaagtggtgnntttttttttttttttttttttttttttttt

SEQ ID NO: 6741 - DNA, 84 bp, synthetic construct
  source 1..84: mol_type = other DNA
tttttttaagcagtggtatcaacgcagagtacnncggcatatnnggagacaanntttttttttttttttttttttttttttttt

SEQ ID NO: 6742 - DNA, 84 bp, synthetic construct
  source 1..84: mol_type = other DNA
tttttttaagcagtggtatcaacgcagagtacnncggcatatnntcaaggacnntttttttttttttttttttttttttttttt

SEQ ID NO: 6743 - DNA, 84 bp, synthetic construct
  source 1..84: mol_type = other DNA
tttttttaagcagtggtatcaacgcagagtacnncggcatatnnaagagagcnntttttttttttttttttttttttttttttt

SEQ ID NO: 6744 - DNA, 84 bp, synthetic construct
  source 1..84: mol_type = other DNA
tttttttaagcagtggtatcaacgcagagtacnncggcatatnncgagagatnntttttttttttttttttttttttttttttt

SEQ ID NO: 6745 - DNA, 84 bp, synthetic construct
  source 1..84: mol_type = other DNA
tttttttaagcagtggtatcaacgcagagtacnncggcatatnnacagatggnntttttttttttttttttttttttttttttt

SEQ ID NO: 6746 - DNA, 84 bp, synthetic construct
  source 1..84: mol_type = other DNA
tttttttaagcagtggtatcaacgcagagtacnncggcatatnnaggagtcanntttttttttttttttttttttttttttttt

SEQ ID NO: 6747 - DNA, 84 bp, synthetic construct
  source 1..84: mol_type = other DNA
tttttttaagcagtggtatcaacgcagagtacnncggcatatnncgtgttacnntttttttttttttttttttttttttttttt

SEQ ID NO: 6748 - DNA, 84 bp, synthetic construct
  source 1..84: mol_type = other DNA
tttttttaagcagtggtatcaacgcagagtacnncggcatatnntagtgtgcnntttttttttttttttttttttttttttttt

SEQ ID NO: 6749 - DNA, 84 bp, synthetic construct
  source 1..84: mol_type = other DNA
tttttttaagcagtggtatcaacgcagagtacnncggcatatnnctcatgacnntttttttttttttttttttttttttttttt

SEQ ID NO: 6750 - DNA, 84 bp, synthetic construct
  source 1..84: mol_type = other DNA
tttttttaagcagtggtatcaacgcagagtacnncggcatatnngtatccagnntttttttttttttttttttttttttttttt

SEQ ID NO: 6751 - DNA, 84 bp, synthetic construct
  source 1..84: mol_type = other DNA
tttttttaagcagtggtatcaacgcagagtacnncggcatatnnacgcctatnntttttttttttttttttttttttttttttt

SEQ ID NO: 6752 - DNA, 84 bp, synthetic construct
  source 1..84: mol_type = other DNA
tttttttaagcagtggtatcaacgcagagtacnncggcatatnnaacgacctnntttttttttttttttttttttttttttttt

SEQ ID NO: 6753 - DNA, 84 bp, synthetic construct
  source 1..84: mol_type = other DNA
tttttttaagcagtggtatcaacgcagagtacnncggcatatnnatcaggctnntttttttttttttttttttttttttttttt

SEQ ID NO: 6754 - DNA, 84 bp, synthetic construct
  source 1..84: mol_type = other DNA
tttttttaagcagtggtatcaacgcagagtacnncggcatatnncaagttcgnntttttttttttttttttttttttttttttt

SEQ ID NO: 6755 - DNA, 84 bp, synthetic construct
  source 1..84: mol_type = other DNA
tttttttaagcagtggtatcaacgcagagtacnncggcatatnntagccaganntttttttttttttttttttttttttttttt

SEQ ID NO: 6756 - DNA, 84 bp, synthetic construct
  source 1..84: mol_type = other DNA
tttttttaagcagtggtatcaacgcagagtacnncggcatatnncaatcacgnntttttttttttttttttttttttttttttt

SEQ ID NO: 6757 - DNA, 84 bp, synthetic construct
  source 1..84: mol_type = other DNA
tttttttaagcagtggtatcaacgcagagtacnncggcatatnngcaacaagnntttttttttttttttttttttttttttttt

SEQ ID NO: 6758 - DNA, 84 bp, synthetic construct
  source 1..84: mol_type = other DNA
tttttttaagcagtggtatcaacgcagagtacnncggcatatnncacgacaanntttttttttttttttttttttttttttttt

SEQ ID NO: 6759 - DNA, 84 bp, synthetic construct
  source 1..84: mol_type = other DNA
tttttttaagcagtggtatcaacgcagagtacnncggcatatnntacggaganntttttttttttttttttttttttttttttt

SEQ ID NO: 6760 - DNA, 84 bp, synthetic construct
  source 1..84: mol_type = other DNA
tttttttaagcagtggtatcaacgcagagtacnncggcatatnncgacaaganntttttttttttttttttttttttttttttt

SEQ ID NO: 6761 - DNA, 84 bp, synthetic construct
  source 1..84: mol_type = other DNA
tttttttaagcagtggtatcaacgcagagtacnncggcatatnncgaagtganntttttttttttttttttttttttttttttt

SEQ ID NO: 6762 - DNA, 84 bp, synthetic construct
  source 1..84: mol_type = other DNA
tttttttaagcagtggtatcaacgcagagtacnncggcatatnnagctggtanntttttttttttttttttttttttttttttt

SEQ ID NO: 6763 - DNA, 84 bp, synthetic construct
  source 1..84: mol_type = other DNA
tttttttaagcagtggtatcaacgcagagtacnncggcatatnnaactaggcnntttttttttttttttttttttttttttttt

SEQ ID NO: 6764 - DNA, 84 bp, synthetic construct
  source 1..84: mol_type = other DNA
tttttttaagcagtggtatcaacgcagagtacnncggcatatnncagcaagtnntttttttttttttttttttttttttttttt

SEQ ID NO: 6765 - DNA, 84 bp, synthetic construct
  source 1..84: mol_type = other DNA
tttttttaagcagtggtatcaacgcagagtacnncggcatatnnacgaggtanntttttttttttttttttttttttttttttt

SEQ ID NO: 6766 - DNA, 84 bp, synthetic construct
  source 1..84: mol_type = other DNA
tttttttaagcagtggtatcaacgcagagtacnncggcatatnncatcttccnntttttttttttttttttttttttttttttt

SEQ ID NO: 6767 - DNA, 84 bp, synthetic construct
  source 1..84: mol_type = other DNA
tttttttaagcagtggtatcaacgcagagtacnncggcatatnncctgaatcnntttttttttttttttttttttttttttttt

SEQ ID NO: 6768 - DNA, 84 bp, synthetic construct
  source 1..84: mol_type = other DNA
tttttttaagcagtggtatcaacgcagagtacnncggcatatnntgcagactnntttttttttttttttttttttttttttttt

SEQ ID NO: 6769 - DNA, 84 bp, synthetic construct
  source 1..84: mol_type = other DNA
tttttttaagcagtggtatcaacgcagagtacnncggcatatnnagatgtggnntttttttttttttttttttttttttttttt

SEQ ID NO: 6770 - DNA, 84 bp, synthetic construct
  source 1..84: mol_type = other DNA
tttttttaagcagtggtatcaacgcagagtacnncggcatatnnagttcgacnntttttttttttttttttttttttttttttt

SEQ ID NO: 6771 - DNA, 84 bp, synthetic construct
  source 1..84: mol_type = other DNA
tttttttaagcagtggtatcaacgcagagtacnncggcatatnnacaacctcnntttttttttttttttttttttttttttttt

SEQ ID NO: 6772 - DNA, 84 bp, synthetic construct
  source 1..84: mol_type = other DNA
tttttttaagcagtggtatcaacgcagagtacnncggcatatnncatggtagnntttttttttttttttttttttttttttttt

SEQ ID NO: 6773 - DNA, 84 bp, synthetic construct
  source 1..84: mol_type = other DNA
tttttttaagcagtggtatcaacgcagagtacnncggcatatnncgtatctcnntttttttttttttttttttttttttttttt

SEQ ID NO: 6774 - DNA, 84 bp, synthetic construct
  source 1..84: mol_type = other DNA
tttttttaagcagtggtatcaacgcagagtacnncggcatatnncctagttcnntttttttttttttttttttttttttttttt

SEQ ID NO: 6775 - DNA, 84 bp, synthetic construct
  source 1..84: mol_type = other DNA
tttttttaagcagtggtatcaacgcagagtacnncggcatatnncaagagtcnntttttttttttttttttttttttttttttt

SEQ ID NO: 6776 - DNA, 84 bp, synthetic construct
  source 1..84: mol_type = other DNA
tttttttaagcagtggtatcaacgcagagtacnncggaagaannaatcggcanntttttttttttttttttttttttttttttt

SEQ ID NO: 6777 - DNA, 84 bp, synthetic construct
  source 1..84: mol_type = other DNA
tttttttaagcagtggtatcaacgcagagtacnncggaagaanntacggcatnntttttttttttttttttttttttttttttt

SEQ ID NO: 6778 - DNA, 84 bp, synthetic construct
  source 1..84: mol_type = other DNA
tttttttaagcagtggtatcaacgcagagtacnncggaagaannttggatcgnntttttttttttttttttttttttttttttt

SEQ ID NO: 6779 - DNA, 84 bp, synthetic construct
  source 1..84: mol_type = other DNA
tttttttaagcagtggtatcaacgcagagtacnncggaagaanntggaacganntttttttttttttttttttttttttttttt

SEQ ID NO: 6780 - DNA, 84 bp, synthetic construct
  source 1..84: mol_type = other DNA
tttttttaagcagtggtatcaacgcagagtacnncggaagaannggcaatcanntttttttttttttttttttttttttttttt

SEQ ID NO: 6781 - DNA, 84 bp, synthetic construct
  source 1..84: mol_type = other DNA
tttttttaagcagtggtatcaacgcagagtacnncggaagaanngaatccganntttttttttttttttttttttttttttttt

SEQ ID NO: 6782 - DNA, 84 bp, synthetic construct
  source 1..84: mol_type = other DNA
tttttttaagcagtggtatcaacgcagagtacnncggaagaannttacggtgnntttttttttttttttttttttttttttttt

SEQ ID NO: 6783 - DNA, 84 bp, synthetic construct
  source 1..84: mol_type = other DNA
tttttttaagcagtggtatcaacgcagagtacnncggaagaanncatatcggnntttttttttttttttttttttttttttttt

SEQ ID NO: 6784 - DNA, 84 bp, synthetic construct
  source 1..84: mol_type = other DNA
tttttttaagcagtggtatcaacgcagagtacnncggaagaanncttcggtanntttttttttttttttttttttttttttttt

SEQ ID NO: 6785 - DNA, 84 bp, synthetic construct
  source 1..84: mol_type = other DNA
tttttttaagcagtggtatcaacgcagagtacnncggaagaanntcctaacgnntttttttttttttttttttttttttttttt

SEQ ID NO: 6786 - DNA, 84 bp, synthetic construct
  source 1..84: mol_type = other DNA
tttttttaagcagtggtatcaacgcagagtacnncggaagaanngtaagccanntttttttttttttttttttttttttttttt

SEQ ID NO: 6787 - DNA, 84 bp, synthetic construct
  source 1..84: mol_type = other DNA
tttttttaagcagtggtatcaacgcagagtacnncggaagaanntaaggtggnntttttttttttttttttttttttttttttt

SEQ ID NO: 6788 - DNA, 84 bp, synthetic construct
  source 1..84: mol_type = other DNA
tttttttaagcagtggtatcaacgcagagtacnncggaagaannggtaagctnntttttttttttttttttttttttttttttt

SEQ ID NO: 6789 - DNA, 84 bp, synthetic construct
  source 1..84: mol_type = other DNA
tttttttaagcagtggtatcaacgcagagtacnncggaagaanntgtgtcganntttttttttttttttttttttttttttttt

SEQ ID NO: 6790 - DNA, 84 bp, synthetic construct
  source 1..84: mol_type = other DNA
tttttttaagcagtggtatcaacgcagagtacnncggaagaanngagcatganntttttttttttttttttttttttttttttt

SEQ ID NO: 6791 - DNA, 84 bp, synthetic construct
  source 1..84: mol_type = other DNA
tttttttaagcagtggtatcaacgcagagtacnncggaagaanntcgaagtcnntttttttttttttttttttttttttttttt

SEQ ID NO: 6792 - DNA, 84 bp, synthetic construct
  source 1..84: mol_type = other DNA
tttttttaagcagtggtatcaacgcagagtacnncggaagaannggtgaacanntttttttttttttttttttttttttttttt

SEQ ID NO: 6793 - DNA, 84 bp, synthetic construct
  source 1..84: mol_type = other DNA
tttttttaagcagtggtatcaacgcagagtacnncggaagaannacatgcacnntttttttttttttttttttttttttttttt

SEQ ID NO: 6794 - DNA, 84 bp, synthetic construct
  source 1..84: mol_type = other DNA
tttttttaagcagtggtatcaacgcagagtacnncggaagaannccaacagtnntttttttttttttttttttttttttttttt

SEQ ID NO: 6795 - DNA, 84 bp, synthetic construct
  source 1..84: mol_type = other DNA
tttttttaagcagtggtatcaacgcagagtacnncggaagaannagaacagcnntttttttttttttttttttttttttttttt

SEQ ID NO: 6796 - DNA, 84 bp, synthetic construct
  source 1..84: mol_type = other DNA
tttttttaagcagtggtatcaacgcagagtacnncggaagaanngaacacgtnntttttttttttttttttttttttttttttt

SEQ ID NO: 6797 - DNA, 84 bp, synthetic construct
  source 1..84: mol_type = other DNA
tttttttaagcagtggtatcaacgcagagtacnncggaagaannggtcttcanntttttttttttttttttttttttttttttt

SEQ ID NO: 6798 - DNA, 84 bp, synthetic construct
  source 1..84: mol_type = other DNA
tttttttaagcagtggtatcaacgcagagtacnncggaagaannaggttcagnntttttttttttttttttttttttttttttt

SEQ ID NO: 6799 - DNA, 84 bp, synthetic construct
  source 1..84: mol_type = other DNA
tttttttaagcagtggtatcaacgcagagtacnncggaagaannctagagcanntttttttttttttttttttttttttttttt

SEQ ID NO: 6800 - DNA, 84 bp, synthetic construct
  source 1..84: mol_type = other DNA
tttttttaagcagtggtatcaacgcagagtacnncggaagaanncttctagcnntttttttttttttttttttttttttttttt

SEQ ID NO: 6801 - DNA, 84 bp, synthetic construct
  source 1..84: mol_type = other DNA
tttttttaagcagtggtatcaacgcagagtacnncggaagaanngagtaacgnntttttttttttttttttttttttttttttt

SEQ ID NO: 6802 - DNA, 84 bp, synthetic construct
  source 1..84: mol_type = other DNA
tttttttaagcagtggtatcaacgcagagtacnncggaagaannctaagaggnntttttttttttttttttttttttttttttt

SEQ ID NO: 6803 - DNA, 84 bp, synthetic construct
  source 1..84: mol_type = other DNA
tttttttaagcagtggtatcaacgcagagtacnncggaagaannacgtgtagnntttttttttttttttttttttttttttttt

SEQ ID NO: 6804 - DNA, 84 bp, synthetic construct
  source 1..84: mol_type = other DNA
tttttttaagcagtggtatcaacgcagagtacnncggaagaannactacaggnntttttttttttttttttttttttttttttt

SEQ ID NO: 6805 - DNA, 84 bp, synthetic construct
  source 1..84: mol_type = other DNA
tttttttaagcagtggtatcaacgcagagtacnncggaagaanntacaggtcnntttttttttttttttttttttttttttttt

SEQ ID NO: 6806 - DNA, 84 bp, synthetic construct
  source 1..84: mol_type = other DNA
tttttttaagcagtggtatcaacgcagagtacnncggaagaannctcacatgnntttttttttttttttttttttttttttttt

SEQ ID NO: 6807 - DNA, 84 bp, synthetic construct
  source 1..84: mol_type = other DNA
tttttttaagcagtggtatcaacgcagagtacnncggaagaannactaggagnntttttttttttttttttttttttttttttt

SEQ ID NO: 6808 - DNA, 84 bp, synthetic construct
  source 1..84: mol_type = other DNA
tttttttaagcagtggtatcaacgcagagtacnncggaagaannccatagganntttttttttttttttttttttttttttttt

SEQ ID NO: 6809 - DNA, 84 bp, synthetic construct
  source 1..84: mol_type = other DNA
tttttttaagcagtggtatcaacgcagagtacnncggaagaannggagaatcnntttttttttttttttttttttttttttttt

SEQ ID NO: 6810 - DNA, 84 bp, synthetic construct
  source 1..84: mol_type = other DNA
tttttttaagcagtggtatcaacgcagagtacnncggaagaanngccaagaanntttttttttttttttttttttttttttttt

SEQ ID NO: 6811 - DNA, 84 bp, synthetic construct
  source 1..84: mol_type = other DNA
tttttttaagcagtggtatcaacgcagagtacnncggaagaannaaggcaagnntttttttttttttttttttttttttttttt

SEQ ID NO: 6812 - DNA, 84 bp, synthetic construct
  source 1..84: mol_type = other DNA
tttttttaagcagtggtatcaacgcagagtacnncggaagaannaatgtcgcnntttttttttttttttttttttttttttttt

SEQ ID NO: 6813 - DNA, 84 bp, synthetic construct
  source 1..84: mol_type = other DNA
tttttttaagcagtggtatcaacgcagagtacnncggaagaannatggaaccnntttttttttttttttttttttttttttttt

SEQ ID NO: 6814 - DNA, 84 bp, synthetic construct
  source 1..84: mol_type = other DNA
tttttttaagcagtggtatcaacgcagagtacnncggaagaannagaggcatnntttttttttttttttttttttttttttttt

SEQ ID NO: 6815 - DNA, 84 bp, synthetic construct
  source 1..84: mol_type = other DNA
tttttttaagcagtggtatcaacgcagagtacnncggaagaanntgcatagcnntttttttttttttttttttttttttttttt

SEQ ID NO: 6816 - DNA, 84 bp, synthetic construct
  source 1..84: mol_type = other DNA
tttttttaagcagtggtatcaacgcagagtacnncggaagaannctaacgganntttttttttttttttttttttttttttttt

SEQ ID NO: 6817 - DNA, 84 bp, synthetic construct
  source 1..84: mol_type = other DNA
tttttttaagcagtggtatcaacgcagagtacnncggaagaanntatcgaggnntttttttttttttttttttttttttttttt

SEQ ID NO: 6818 - DNA, 84 bp, synthetic construct
  source 1..84: mol_type = other DNA
tttttttaagcagtggtatcaacgcagagtacnncggaagaanncatagcctnntttttttttttttttttttttttttttttt

SEQ ID NO: 6819 - DNA, 84 bp, synthetic construct
  source 1..84: mol_type = other DNA
tttttttaagcagtggtatcaacgcagagtacnncggaagaannatcgagacnntttttttttttttttttttttttttttttt

SEQ ID NO: 6820 - DNA, 84 bp, synthetic construct
  source 1..84: mol_type = other DNA
tttttttaagcagtggtatcaacgcagagtacnncggaagaannggaagagtnntttttttttttttttttttttttttttttt

SEQ ID NO: 6821 - DNA, 84 bp, synthetic construct
  source 1..84: mol_type = other DNA
tttttttaagcagtggtatcaacgcagagtacnncggaagaannccaagtagnntttttttttttttttttttttttttttttt

SEQ ID NO: 6822 - DNA, 84 bp, synthetic construct
  source 1..84: mol_type = other DNA
tttttttaagcagtggtatcaacgcagagtacnncggaagaannctgaacagnntttttttttttttttttttttttttttttt

SEQ ID NO: 6823 - DNA, 84 bp, synthetic construct
  source 1..84: mol_type = other DNA
tttttttaagcagtggtatcaacgcagagtacnncggaagaanngtaggttcnntttttttttttttttttttttttttttttt

SEQ ID NO: 6824 - DNA, 84 bp, synthetic construct
  source 1..84: mol_type = other DNA
tttttttaagcagtggtatcaacgcagagtacnncggaagaanngtatggacnntttttttttttttttttttttttttttttt

SEQ ID NO: 6825 - DNA, 84 bp, synthetic construct
  source 1..84: mol_type = other DNA
tttttttaagcagtggtatcaacgcagagtacnncggaagaanntcgcaacanntttttttttttttttttttttttttttttt

SEQ ID NO: 6826 - DNA, 84 bp, synthetic construct
  source 1..84: mol_type = other DNA
tttttttaagcagtggtatcaacgcagagtacnncggaagaannccgctaatnntttttttttttttttttttttttttttttt

SEQ ID NO: 6827 - DNA, 84 bp, synthetic construct
  source 1..84: mol_type = other DNA
tttttttaagcagtggtatcaacgcagagtacnncggaagaanngattcgcanntttttttttttttttttttttttttttttt

SEQ ID NO: 6828 - DNA, 84 bp, synthetic construct
  source 1..84: mol_type = other DNA
tttttttaagcagtggtatcaacgcagagtacnncggaagaanncgatggaanntttttttttttttttttttttttttttttt

SEQ ID NO: 6829 - DNA, 84 bp, synthetic construct
  source 1..84: mol_type = other DNA
tttttttaagcagtggtatcaacgcagagtacnncggaagaannagcaagganntttttttttttttttttttttttttttttt

SEQ ID NO: 6830 - DNA, 84 bp, synthetic construct
  source 1..84: mol_type = other DNA
tttttttaagcagtggtatcaacgcagagtacnncggaagaanncgtagcaanntttttttttttttttttttttttttttttt

SEQ ID NO: 6831 - DNA, 84 bp, synthetic construct
  source 1..84: mol_type = other DNA
tttttttaagcagtggtatcaacgcagagtacnncggaagaanntggcagtanntttttttttttttttttttttttttttttt

SEQ ID NO: 6832 - DNA, 84 bp, synthetic construct
  source 1..84: mol_type = other DNA
tttttttaagcagtggtatcaacgcagagtacnncggaagaanncggtagttnntttttttttttttttttttttttttttttt

SEQ ID NO: 6833 - DNA, 84 bp, synthetic construct
  source 1..84: mol_type = other DNA
tttttttaagcagtggtatcaacgcagagtacnncggaagaanntgacttcgnntttttttttttttttttttttttttttttt

SEQ ID NO: 6834 - DNA, 84 bp, synthetic construct
  source 1..84: mol_type = other DNA
tttttttaagcagtggtatcaacgcagagtacnncggaagaanngagtgcaanntttttttttttttttttttttttttttttt

SEQ ID NO: 6835 - DNA, 84 bp, synthetic construct
  source 1..84: mol_type = other DNA
tttttttaagcagtggtatcaacgcagagtacnncggaagaannacggtaacnntttttttttttttttttttttttttttttt

SEQ ID NO: 6836 - DNA, 84 bp, synthetic construct
  source 1..84: mol_type = other DNA
tttttttaagcagtggtatcaacgcagagtacnncggaagaannaagtggtgnntttttttttttttttttttttttttttttt

SEQ ID NO: 6837 - DNA, 84 bp, synthetic construct
  source 1..84: mol_type = other DNA
tttttttaagcagtggtatcaacgcagagtacnncggaagaannggagacaanntttttttttttttttttttttttttttttt

SEQ ID NO: 6838 - DNA, 84 bp, synthetic construct
  source 1..84: mol_type = other DNA
tttttttaagcagtggtatcaacgcagagtacnncggaagaanntcaaggacnntttttttttttttttttttttttttttttt

SEQ ID NO: 6839 - DNA, 84 bp, synthetic construct
  source 1..84: mol_type = other DNA
tttttttaagcagtggtatcaacgcagagtacnncggaagaannaagagagcnntttttttttttttttttttttttttttttt

SEQ ID NO: 6840 - DNA, 84 bp, synthetic construct
  source 1..84: mol_type = other DNA
tttttttaagcagtggtatcaacgcagagtacnncggaagaanncgagagatnntttttttttttttttttttttttttttttt

SEQ ID NO: 6841 - DNA, 84 bp, synthetic construct
  source 1..84: mol_type = other DNA
tttttttaagcagtggtatcaacgcagagtacnncggaagaannacagatggnntttttttttttttttttttttttttttttt

SEQ ID NO: 6842 - DNA, 84 bp, synthetic construct
  source 1..84: mol_type = other DNA
tttttttaagcagtggtatcaacgcagagtacnncggaagaannaggagtcanntttttttttttttttttttttttttttttt

SEQ ID NO: 6843 - DNA, 84 bp, synthetic construct
  source 1..84: mol_type = other DNA
tttttttaagcagtggtatcaacgcagagtacnncggaagaanncgtgttacnntttttttttttttttttttttttttttttt

SEQ ID NO: 6844 - DNA, 84 bp, synthetic construct
  source 1..84: mol_type = other DNA
tttttttaagcagtggtatcaacgcagagtacnncggaagaanntagtgtgcnntttttttttttttttttttttttttttttt

SEQ ID NO: 6845 - DNA, 84 bp, synthetic construct
  source 1..84: mol_type = other DNA
tttttttaagcagtggtatcaacgcagagtacnncggaagaannctcatgacnntttttttttttttttttttttttttttttt

SEQ ID NO: 6846 - DNA, 84 bp, synthetic construct
  source 1..84: mol_type = other DNA
tttttttaagcagtggtatcaacgcagagtacnncggaagaanngtatccagnntttttttttttttttttttttttttttttt

SEQ ID NO: 6847 - DNA, 84 bp, synthetic construct
  source 1..84: mol_type = other DNA
tttttttaagcagtggtatcaacgcagagtacnncggaagaannacgcctatnntttttttttttttttttttttttttttttt

SEQ ID NO: 6848 - DNA, 84 bp, synthetic construct
  source 1..84: mol_type = other DNA
tttttttaagcagtggtatcaacgcagagtacnncggaagaannaacgacctnntttttttttttttttttttttttttttttt

SEQ ID NO: 6849 - DNA, 84 bp, synthetic construct
  source 1..84: mol_type = other DNA
tttttttaagcagtggtatcaacgcagagtacnncggaagaannatcaggctnntttttttttttttttttttttttttttttt

SEQ ID NO: 6850 - DNA, 84 bp, synthetic construct
  source 1..84: mol_type = other DNA
tttttttaagcagtggtatcaacgcagagtacnncggaagaanncaagttcgnntttttttttttttttttttttttttttttt

SEQ ID NO: 6851 - DNA, 84 bp, synthetic construct
  source 1..84: mol_type = other DNA
tttttttaagcagtggtatcaacgcagagtacnncggaagaanntagccaganntttttttttttttttttttttttttttttt

SEQ ID NO: 6852 - DNA, 84 bp, synthetic construct
  source 1..84: mol_type = other DNA
tttttttaagcagtggtatcaacgcagagtacnncggaagaanncaatcacgnntttttttttttttttttttttttttttttt

SEQ ID NO: 6853 - DNA, 84 bp, synthetic construct
  source 1..84: mol_type = other DNA
tttttttaagcagtggtatcaacgcagagtacnncggaagaanngcaacaagnntttttttttttttttttttttttttttttt

SEQ ID NO: 6854 - DNA, 84 bp, synthetic construct
  source 1..84: mol_type = other DNA
tttttttaagcagtggtatcaacgcagagtacnncggaagaanncacgacaanntttttttttttttttttttttttttttttt

SEQ ID NO: 6855 - DNA, 84 bp, synthetic construct
  source 1..84: mol_type = other DNA
tttttttaagcagtggtatcaacgcagagtacnncggaagaanntacggaganntttttttttttttttttttttttttttttt

SEQ ID NO: 6856 - DNA, 84 bp, synthetic construct
  source 1..84: mol_type = other DNA
tttttttaagcagtggtatcaacgcagagtacnncggaagaanncgacaaganntttttttttttttttttttttttttttttt

SEQ ID NO: 6857 - DNA, 84 bp, synthetic construct
  source 1..84: mol_type = other DNA
tttttttaagcagtggtatcaacgcagagtacnncggaagaanncgaagtganntttttttttttttttttttttttttttttt

SEQ ID NO: 6858 - DNA, 84 bp, synthetic construct
  source 1..84: mol_type = other DNA
tttttttaagcagtggtatcaacgcagagtacnncggaagaannagctggtanntttttttttttttttttttttttttttttt

SEQ ID NO: 6859 - DNA, 84 bp, synthetic construct
  source 1..84: mol_type = other DNA
tttttttaagcagtggtatcaacgcagagtacnncggaagaannaactaggcnntttttttttttttttttttttttttttttt

SEQ ID NO: 6860 - DNA, 84 bp, synthetic construct
  source 1..84: mol_type = other DNA
tttttttaagcagtggtatcaacgcagagtacnncggaagaanncagcaagtnntttttttttttttttttttttttttttttt

SEQ ID NO: 6861 - DNA, 84 bp, synthetic construct
  source 1..84: mol_type = other DNA
tttttttaagcagtggtatcaacgcagagtacnncggaagaannacgaggtanntttttttttttttttttttttttttttttt

SEQ ID NO: 6862 - DNA, 84 bp, synthetic construct
  source 1..84: mol_type = other DNA
tttttttaagcagtggtatcaacgcagagtacnncggaagaanncatcttccnntttttttttttttttttttttttttttttt

SEQ ID NO: 6863 - DNA, 84 bp, synthetic construct
  source 1..84: mol_type = other DNA
tttttttaagcagtggtatcaacgcagagtacnncggaagaanncctgaatcnntttttttttttttttttttttttttttttt

SEQ ID NO: 6864 - DNA, 84 bp, synthetic construct
  source 1..84: mol_type = other DNA
tttttttaagcagtggtatcaacgcagagtacnncggaagaanntgcagactnntttttttttttttttttttttttttttttt

SEQ ID NO: 6865 - DNA, 84 bp, synthetic construct
  source 1..84: mol_type = other DNA
tttttttaagcagtggtatcaacgcagagtacnncggaagaannagatgtggnntttttttttttttttttttttttttttttt

SEQ ID NO: 6866 - DNA, 84 bp, synthetic construct
  source 1..84: mol_type = other DNA
tttttttaagcagtggtatcaacgcagagtacnncggaagaannagttcgacnntttttttttttttttttttttttttttttt

SEQ ID NO: 6867 - DNA, 84 bp, synthetic construct
  source 1..84: mol_type = other DNA
tttttttaagcagtggtatcaacgcagagtacnncggaagaannacaacctcnntttttttttttttttttttttttttttttt

SEQ ID NO: 6868 - DNA, 84 bp, synthetic construct
  source 1..84: mol_type = other DNA
tttttttaagcagtggtatcaacgcagagtacnncggaagaanncatggtagnntttttttttttttttttttttttttttttt

SEQ ID NO: 6869 - DNA, 84 bp, synthetic construct
  source 1..84: mol_type = other DNA
tttttttaagcagtggtatcaacgcagagtacnncggaagaanncgtatctcnntttttttttttttttttttttttttttttt

SEQ ID NO: 6870 - DNA, 84 bp, synthetic construct
  source 1..84: mol_type = other DNA
tttttttaagcagtggtatcaacgcagagtacnncggaagaanncctagttcnntttttttttttttttttttttttttttttt

SEQ ID NO: 6871 - DNA, 84 bp, synthetic construct
  source 1..84: mol_type = other DNA
tttttttaagcagtggtatcaacgcagagtacnncggaagaanncaagagtcnntttttttttttttttttttttttttttttt

SEQ ID NO: 6872 - DNA, 84 bp, synthetic construct
  source 1..84: mol_type = other DNA
tttttttaagcagtggtatcaacgcagagtacnnattggtgcnnaatcggcanntttttttttttttttttttttttttttttt

SEQ ID NO: 6873 - DNA, 84 bp, synthetic construct
  source 1..84: mol_type = other DNA
tttttttaagcagtggtatcaacgcagagtacnnattggtgcnntacggcatnntttttttttttttttttttttttttttttt

SEQ ID NO: 6874 - DNA, 84 bp, synthetic construct
  source 1..84: mol_type = other DNA
tttttttaagcagtggtatcaacgcagagtacnnattggtgcnnttggatcgnntttttttttttttttttttttttttttttt

SEQ ID NO: 6875 - DNA, 84 bp, synthetic construct
  source 1..84: mol_type = other DNA
tttttttaagcagtggtatcaacgcagagtacnnattggtgcnntggaacganntttttttttttttttttttttttttttttt

SEQ ID NO: 6876 - DNA, 84 bp, synthetic construct
  source 1..84: mol_type = other DNA
tttttttaagcagtggtatcaacgcagagtacnnattggtgcnnggcaatcanntttttttttttttttttttttttttttttt

SEQ ID NO: 6877 - DNA, 84 bp, synthetic construct
  source 1..84: mol_type = other DNA
tttttttaagcagtggtatcaacgcagagtacnnattggtgcnngaatccganntttttttttttttttttttttttttttttt

SEQ ID NO: 6878 - DNA, 84 bp, synthetic construct
  source 1..84: mol_type = other DNA
tttttttaagcagtggtatcaacgcagagtacnnattggtgcnnttacggtgnntttttttttttttttttttttttttttttt

SEQ ID NO: 6879 - DNA, 84 bp, synthetic construct
  source 1..84: mol_type = other DNA
tttttttaagcagtggtatcaacgcagagtacnnattggtgcnncatatcggnntttttttttttttttttttttttttttttt

SEQ ID NO: 6880 - DNA, 84 bp, synthetic construct
  source 1..84: mol_type = other DNA
tttttttaagcagtggtatcaacgcagagtacnnattggtgcnncttcggtanntttttttttttttttttttttttttttttt

SEQ ID NO: 6881 - DNA, 84 bp, synthetic construct
  source 1..84: mol_type = other DNA
tttttttaagcagtggtatcaacgcagagtacnnattggtgcnntcctaacgnntttttttttttttttttttttttttttttt

SEQ ID NO: 6882 - DNA, 84 bp, synthetic construct
  source 1..84: mol_type = other DNA
tttttttaagcagtggtatcaacgcagagtacnnattggtgcnngtaagccanntttttttttttttttttttttttttttttt

SEQ ID NO: 6883 - DNA, 84 bp, synthetic construct
  source 1..84: mol_type = other DNA
tttttttaagcagtggtatcaacgcagagtacnnattggtgcnntaaggtggnntttttttttttttttttttttttttttttt

SEQ ID NO: 6884 - DNA, 84 bp, synthetic construct
  source 1..84: mol_type = other DNA
tttttttaagcagtggtatcaacgcagagtacnnattggtgcnnggtaagctnntttttttttttttttttttttttttttttt

SEQ ID NO: 6885 - DNA, 84 bp, synthetic construct
  source 1..84: mol_type = other DNA
tttttttaagcagtggtatcaacgcagagtacnnattggtgcnntgtgtcganntttttttttttttttttttttttttttttt

SEQ ID NO: 6886 - DNA, 84 bp, synthetic construct
  source 1..84: mol_type = other DNA
tttttttaagcagtggtatcaacgcagagtacnnattggtgcnngagcatganntttttttttttttttttttttttttttttt

SEQ ID NO: 6887 - DNA, 84 bp, synthetic construct
  source 1..84: mol_type = other DNA
tttttttaagcagtggtatcaacgcagagtacnnattggtgcnntcgaagtcnntttttttttttttttttttttttttttttt

SEQ ID NO: 6888 - DNA, 84 bp, synthetic construct
  source 1..84: mol_type = other DNA
tttttttaagcagtggtatcaacgcagagtacnnattggtgcnnggtgaacanntttttttttttttttttttttttttttttt

SEQ ID NO: 6889 - DNA, 84 bp, synthetic construct
  source 1..84: mol_type = other DNA
tttttttaagcagtggtatcaacgcagagtacnnattggtgcnnacatgcacnntttttttttttttttttttttttttttttt

SEQ ID NO: 6890 - DNA, 84 bp, synthetic construct
  source 1..84: mol_type = other DNA
tttttttaagcagtggtatcaacgcagagtacnnattggtgcnnccaacagtnntttttttttttttttttttttttttttttt

SEQ ID NO: 6891 - DNA, 84 bp, synthetic construct
  source 1..84: mol_type = other DNA
tttttttaagcagtggtatcaacgcagagtacnnattggtgcnnagaacagcnntttttttttttttttttttttttttttttt

SEQ ID NO: 6892 - DNA, 84 bp, synthetic construct
  source 1..84: mol_type = other DNA
tttttttaagcagtggtatcaacgcagagtacnnattggtgcnngaacacgtnntttttttttttttttttttttttttttttt

SEQ ID NO: 6893 - DNA, 84 bp, synthetic construct
  source 1..84: mol_type = other DNA
tttttttaagcagtggtatcaacgcagagtacnnattggtgcnnggtcttcanntttttttttttttttttttttttttttttt

SEQ ID NO: 6894 - DNA, 84 bp, synthetic construct
  source 1..84: mol_type = other DNA
tttttttaagcagtggtatcaacgcagagtacnnattggtgcnnaggttcagnntttttttttttttttttttttttttttttt

SEQ ID NO: 6895 - DNA, 84 bp, synthetic construct
  source 1..84: mol_type = other DNA
tttttttaagcagtggtatcaacgcagagtacnnattggtgcnnctagagcanntttttttttttttttttttttttttttttt

SEQ ID NO: 6896 - DNA, 84 bp, synthetic construct
  source 1..84: mol_type = other DNA
tttttttaagcagtggtatcaacgcagagtacnnattggtgcnncttctagcnntttttttttttttttttttttttttttttt

SEQ ID NO: 6897 - DNA, 84 bp, synthetic construct
  source 1..84: mol_type = other DNA
tttttttaagcagtggtatcaacgcagagtacnnattggtgcnngagtaacgnntttttttttttttttttttttttttttttt

SEQ ID NO: 6898 - DNA, 84 bp, synthetic construct
  source 1..84: mol_type = other DNA
tttttttaagcagtggtatcaacgcagagtacnnattggtgcnnctaagaggnntttttttttttttttttttttttttttttt

SEQ ID NO: 6899 - DNA, 84 bp, synthetic construct
  source 1..84: mol_type = other DNA
tttttttaagcagtggtatcaacgcagagtacnnattggtgcnnacgtgtagnntttttttttttttttttttttttttttttt

SEQ ID NO: 6900 - DNA, 84 bp, synthetic construct
  source 1..84: mol_type = other DNA
tttttttaagcagtggtatcaacgcagagtacnnattggtgcnnactacaggnntttttttttttttttttttttttttttttt

SEQ ID NO: 6901 - DNA, 84 bp, synthetic construct
  source 1..84: mol_type = other DNA
tttttttaagcagtggtatcaacgcagagtacnnattggtgcnntacaggtcnntttttttttttttttttttttttttttttt

SEQ ID NO: 6902 - DNA, 84 bp, synthetic construct
  source 1..84: mol_type = other DNA
tttttttaagcagtggtatcaacgcagagtacnnattggtgcnnctcacatgnntttttttttttttttttttttttttttttt

SEQ ID NO: 6903 - DNA, 84 bp, synthetic construct
  source 1..84: mol_type = other DNA
tttttttaagcagtggtatcaacgcagagtacnnattggtgcnnactaggagnntttttttttttttttttttttttttttttt

SEQ ID NO: 6904 - DNA, 84 bp, synthetic construct
  source 1..84: mol_type = other DNA
tttttttaagcagtggtatcaacgcagagtacnnattggtgcnnccatagganntttttttttttttttttttttttttttttt

SEQ ID NO: 6905 - DNA, 84 bp, synthetic construct
  source 1..84: mol_type = other DNA
tttttttaagcagtggtatcaacgcagagtacnnattggtgcnnggagaatcnntttttttttttttttttttttttttttttt

SEQ ID NO: 6906 - DNA, 84 bp, synthetic construct
  source 1..84: mol_type = other DNA
tttttttaagcagtggtatcaacgcagagtacnnattggtgcnngccaagaanntttttttttttttttttttttttttttttt

SEQ ID NO: 6907 - DNA, 84 bp, synthetic construct
  source 1..84: mol_type = other DNA
tttttttaagcagtggtatcaacgcagagtacnnattggtgcnnaaggcaagnntttttttttttttttttttttttttttttt

SEQ ID NO: 6908 - DNA, 84 bp, synthetic construct
  source 1..84: mol_type = other DNA
tttttttaagcagtggtatcaacgcagagtacnnattggtgcnnaatgtcgcnntttttttttttttttttttttttttttttt

SEQ ID NO: 6909 - DNA, 84 bp, synthetic construct
  source 1..84: mol_type = other DNA
tttttttaagcagtggtatcaacgcagagtacnnattggtgcnnatggaaccnntttttttttttttttttttttttttttttt

SEQ ID NO: 6910 - DNA, 84 bp, synthetic construct
  source 1..84: mol_type = other DNA
tttttttaagcagtggtatcaacgcagagtacnnattggtgcnnagaggcatnntttttttttttttttttttttttttttttt

SEQ ID NO: 6911 - DNA, 84 bp, synthetic construct
  source 1..84: mol_type = other DNA
tttttttaagcagtggtatcaacgcagagtacnnattggtgcnntgcatagcnntttttttttttttttttttttttttttttt

SEQ ID NO: 6912 - DNA, 84 bp, synthetic construct
  source 1..84: mol_type = other DNA
tttttttaagcagtggtatcaacgcagagtacnnattggtgcnnctaacgganntttttttttttttttttttttttttttttt

SEQ ID NO: 6913 - DNA, 84 bp, synthetic construct
  source 1..84: mol_type = other DNA
tttttttaagcagtggtatcaacgcagagtacnnattggtgcnntatcgaggnntttttttttttttttttttttttttttttt

SEQ ID NO: 6914 - DNA, 84 bp, synthetic construct
  source 1..84: mol_type = other DNA
tttttttaagcagtggtatcaacgcagagtacnnattggtgcnncatagcctnntttttttttttttttttttttttttttttt

SEQ ID NO: 6915 - DNA, 84 bp, synthetic construct
  source 1..84: mol_type = other DNA
tttttttaagcagtggtatcaacgcagagtacnnattggtgcnnatcgagacnntttttttttttttttttttttttttttttt

SEQ ID NO: 6916 - DNA, 84 bp, synthetic construct
  source 1..84: mol_type = other DNA
tttttttaagcagtggtatcaacgcagagtacnnattggtgcnnggaagagtnntttttttttttttttttttttttttttttt

SEQ ID NO: 6917 - DNA, 84 bp, synthetic construct
  source 1..84: mol_type = other DNA
tttttttaagcagtggtatcaacgcagagtacnnattggtgcnnccaagtagnntttttttttttttttttttttttttttttt

SEQ ID NO: 6918 - DNA, 84 bp, synthetic construct
  source 1..84: mol_type = other DNA
tttttttaagcagtggtatcaacgcagagtacnnattggtgcnnctgaacagnntttttttttttttttttttttttttttttt

SEQ ID NO: 6919 - DNA, 84 bp, synthetic construct
  source 1..84: mol_type = other DNA
tttttttaagcagtggtatcaacgcagagtacnnattggtgcnngtaggttcnntttttttttttttttttttttttttttttt

SEQ ID NO: 6920 - DNA, 84 bp, synthetic construct
  source 1..84: mol_type = other DNA
tttttttaagcagtggtatcaacgcagagtacnnattggtgcnngtatggacnntttttttttttttttttttttttttttttt

SEQ ID NO: 6921 - DNA, 84 bp, synthetic construct
  source 1..84: mol_type = other DNA
tttttttaagcagtggtatcaacgcagagtacnnattggtgcnntcgcaacanntttttttttttttttttttttttttttttt

SEQ ID NO: 6922 - DNA, 84 bp, synthetic construct
  source 1..84: mol_type = other DNA
tttttttaagcagtggtatcaacgcagagtacnnattggtgcnnccgctaatnntttttttttttttttttttttttttttttt

SEQ ID NO: 6923 - DNA, 84 bp, synthetic construct
  source 1..84: mol_type = other DNA
tttttttaagcagtggtatcaacgcagagtacnnattggtgcnngattcgcanntttttttttttttttttttttttttttttt

SEQ ID NO: 6924 - DNA, 84 bp, synthetic construct
  source 1..84: mol_type = other DNA
tttttttaagcagtggtatcaacgcagagtacnnattggtgcnncgatggaanntttttttttttttttttttttttttttttt

SEQ ID NO: 6925 - DNA, 84 bp, synthetic construct
  source 1..84: mol_type = other DNA
tttttttaagcagtggtatcaacgcagagtacnnattggtgcnnagcaagganntttttttttttttttttttttttttttttt

SEQ ID NO: 6926 - DNA, 84 bp, synthetic construct
  source 1..84: mol_type = other DNA
tttttttaagcagtggtatcaacgcagagtacnnattggtgcnncgtagcaanntttttttttttttttttttttttttttttt

SEQ ID NO: 6927 - DNA, 84 bp, synthetic construct
  source 1..84: mol_type = other DNA
tttttttaagcagtggtatcaacgcagagtacnnattggtgcnntggcagtanntttttttttttttttttttttttttttttt

SEQ ID NO: 6928 - DNA, 84 bp, synthetic construct
  source 1..84: mol_type = other DNA
tttttttaagcagtggtatcaacgcagagtacnnattggtgcnncggtagttnntttttttttttttttttttttttttttttt

SEQ ID NO: 6929 - DNA, 84 bp, synthetic construct
  source 1..84: mol_type = other DNA
tttttttaagcagtggtatcaacgcagagtacnnattggtgcnntgacttcgnntttttttttttttttttttttttttttttt

SEQ ID NO: 6930 - DNA, 84 bp, synthetic construct
  source 1..84: mol_type = other DNA
tttttttaagcagtggtatcaacgcagagtacnnattggtgcnngagtgcaanntttttttttttttttttttttttttttttt

SEQ ID NO: 6931 - DNA, 84 bp, synthetic construct
  source 1..84: mol_type = other DNA
tttttttaagcagtggtatcaacgcagagtacnnattggtgcnnacggtaacnntttttttttttttttttttttttttttttt

SEQ ID NO: 6932 - DNA, 84 bp, synthetic construct
  source 1..84: mol_type = other DNA
tttttttaagcagtggtatcaacgcagagtacnnattggtgcnnaagtggtgnntttttttttttttttttttttttttttttt

SEQ ID NO: 6933 - DNA, 84 bp, synthetic construct
  source 1..84: mol_type = other DNA
tttttttaagcagtggtatcaacgcagagtacnnattggtgcnnggagacaanntttttttttttttttttttttttttttttt

SEQ ID NO: 6934 - DNA, 84 bp, synthetic construct
  source 1..84: mol_type = other DNA
tttttttaagcagtggtatcaacgcagagtacnnattggtgcnntcaaggacnntttttttttttttttttttttttttttttt

SEQ ID NO: 6935 - DNA, 84 bp, synthetic construct
  source 1..84: mol_type = other DNA
tttttttaagcagtggtatcaacgcagagtacnnattggtgcnnaagagagcnntttttttttttttttttttttttttttttt

SEQ ID NO: 6936 - DNA, 84 bp, synthetic construct
  source 1..84: mol_type = other DNA
tttttttaagcagtggtatcaacgcagagtacnnattggtgcnncgagagatnntttttttttttttttttttttttttttttt

SEQ ID NO: 6937 - DNA, 84 bp, synthetic construct
  source 1..84: mol_type = other DNA
tttttttaagcagtggtatcaacgcagagtacnnattggtgcnnacagatggnntttttttttttttttttttttttttttttt

SEQ ID NO: 6938 - DNA, 84 bp, synthetic construct
  source 1..84: mol_type = other DNA
tttttttaagcagtggtatcaacgcagagtacnnattggtgcnnaggagtcanntttttttttttttttttttttttttttttt

SEQ ID NO: 6939 - DNA, 84 bp, synthetic construct
  source 1..84: mol_type = other DNA
tttttttaagcagtggtatcaacgcagagtacnnattggtgcnncgtgttacnntttttttttttttttttttttttttttttt

SEQ ID NO: 6940 - DNA, 84 bp, synthetic construct
  source 1..84: mol_type = other DNA
tttttttaagcagtggtatcaacgcagagtacnnattggtgcnntagtgtgcnntttttttttttttttttttttttttttttt

SEQ ID NO: 6941 - DNA, 84 bp, synthetic construct
  source 1..84: mol_type = other DNA
tttttttaagcagtggtatcaacgcagagtacnnattggtgcnnctcatgacnntttttttttttttttttttttttttttttt

SEQ ID NO: 6942 - DNA, 84 bp, synthetic construct
  source 1..84: mol_type = other DNA
tttttttaagcagtggtatcaacgcagagtacnnattggtgcnngtatccagnntttttttttttttttttttttttttttttt

SEQ ID NO: 6943 - DNA, 84 bp, synthetic construct
  source 1..84: mol_type = other DNA
tttttttaagcagtggtatcaacgcagagtacnnattggtgcnnacgcctatnntttttttttttttttttttttttttttttt

SEQ ID NO: 6944 - DNA, 84 bp, synthetic construct
  source 1..84: mol_type = other DNA
tttttttaagcagtggtatcaacgcagagtacnnattggtgcnnaacgacctnntttttttttttttttttttttttttttttt

SEQ ID NO: 6945 - DNA, 84 bp, synthetic construct
  source 1..84: mol_type = other DNA
tttttttaagcagtggtatcaacgcagagtacnnattggtgcnnatcaggctnntttttttttttttttttttttttttttttt

SEQ ID NO: 6946 - DNA, 84 bp, synthetic construct
  source 1..84: mol_type = other DNA
tttttttaagcagtggtatcaacgcagagtacnnattggtgcnncaagttcgnntttttttttttttttttttttttttttttt

SEQ ID NO: 6947 - DNA, 84 bp, synthetic construct
  source 1..84: mol_type = other DNA
tttttttaagcagtggtatcaacgcagagtacnnattggtgcnntagccaganntttttttttttttttttttttttttttttt

SEQ ID NO: 6948 - DNA, 84 bp, synthetic construct
  source 1..84: mol_type = other DNA
tttttttaagcagtggtatcaacgcagagtacnnattggtgcnncaatcacgnntttttttttttttttttttttttttttttt

SEQ ID NO: 6949 - DNA, 84 bp, synthetic construct
  source 1..84: mol_type = other DNA
tttttttaagcagtggtatcaacgcagagtacnnattggtgcnngcaacaagnntttttttttttttttttttttttttttttt

SEQ ID NO: 6950 - DNA, 84 bp, synthetic construct
  source 1..84: mol_type = other DNA
tttttttaagcagtggtatcaacgcagagtacnnattggtgcnncacgacaanntttttttttttttttttttttttttttttt

SEQ ID NO: 6951 - DNA, 84 bp, synthetic construct
  source 1..84: mol_type = other DNA
tttttttaagcagtggtatcaacgcagagtacnnattggtgcnntacggaganntttttttttttttttttttttttttttttt

SEQ ID NO: 6952 - DNA, 84 bp, synthetic construct
  source 1..84: mol_type = other DNA
tttttttaagcagtggtatcaacgcagagtacnnattggtgcnncgacaaganntttttttttttttttttttttttttttttt

SEQ ID NO: 6953 - DNA, 84 bp, synthetic construct
  source 1..84: mol_type = other DNA
tttttttaagcagtggtatcaacgcagagtacnnattggtgcnncgaagtganntttttttttttttttttttttttttttttt

SEQ ID NO: 6954 - DNA, 84 bp, synthetic construct
  source 1..84: mol_type = other DNA
tttttttaagcagtggtatcaacgcagagtacnnattggtgcnnagctggtanntttttttttttttttttttttttttttttt

SEQ ID NO: 6955 - DNA, 84 bp, synthetic construct
  source 1..84: mol_type = other DNA
tttttttaagcagtggtatcaacgcagagtacnnattggtgcnnaactaggcnntttttttttttttttttttttttttttttt

SEQ ID NO: 6956 - DNA, 84 bp, synthetic construct
  source 1..84: mol_type = other DNA
tttttttaagcagtggtatcaacgcagagtacnnattggtgcnncagcaagtnntttttttttttttttttttttttttttttt

SEQ ID NO: 6957 - DNA, 84 bp, synthetic construct
  source 1..84: mol_type = other DNA
tttttttaagcagtggtatcaacgcagagtacnnattggtgcnnacgaggtanntttttttttttttttttttttttttttttt

SEQ ID NO: 6958 - DNA, 84 bp, synthetic construct
  source 1..84: mol_type = other DNA
tttttttaagcagtggtatcaacgcagagtacnnattggtgcnncatcttccnntttttttttttttttttttttttttttttt

SEQ ID NO: 6959 - DNA, 84 bp, synthetic construct
  source 1..84: mol_type = other DNA
tttttttaagcagtggtatcaacgcagagtacnnattggtgcnncctgaatcnntttttttttttttttttttttttttttttt

SEQ ID NO: 6960 - DNA, 84 bp, synthetic construct
  source 1..84: mol_type = other DNA
tttttttaagcagtggtatcaacgcagagtacnnattggtgcnntgcagactnntttttttttttttttttttttttttttttt

SEQ ID NO: 6961 - DNA, 84 bp, synthetic construct
  source 1..84: mol_type = other DNA
tttttttaagcagtggtatcaacgcagagtacnnattggtgcnnagatgtggnntttttttttttttttttttttttttttttt

SEQ ID NO: 6962 - DNA, 84 bp, synthetic construct
  source 1..84: mol_type = other DNA
tttttttaagcagtggtatcaacgcagagtacnnattggtgcnnagttcgacnntttttttttttttttttttttttttttttt

SEQ ID NO: 6963 - DNA, 84 bp, synthetic construct
  source 1..84: mol_type = other DNA
tttttttaagcagtggtatcaacgcagagtacnnattggtgcnnacaacctcnntttttttttttttttttttttttttttttt

SEQ ID NO: 6964 - DNA, 84 bp, synthetic construct
  source 1..84: mol_type = other DNA
tttttttaagcagtggtatcaacgcagagtacnnattggtgcnncatggtagnntttttttttttttttttttttttttttttt

SEQ ID NO: 6965 - DNA, 84 bp, synthetic construct
  source 1..84: mol_type = other DNA
tttttttaagcagtggtatcaacgcagagtacnnattggtgcnncgtatctcnntttttttttttttttttttttttttttttt

SEQ ID NO: 6966 - DNA, 84 bp, synthetic construct
  source 1..84: mol_type = other DNA
tttttttaagcagtggtatcaacgcagagtacnnattggtgcnncctagttcnntttttttttttttttttttttttttttttt

SEQ ID NO: 6967 - DNA, 84 bp, synthetic construct
  source 1..84: mol_type = other DNA
tttttttaagcagtggtatcaacgcagagtacnnattggtgcnncaagagtcnntttttttttttttttttttttttttttttt

SEQ ID NO: 6968 - DNA, 84 bp, synthetic construct
  source 1..84: mol_type = other DNA
tttttttaagcagtggtatcaacgcagagtacnnggtggattnnaatcggcanntttttttttttttttttttttttttttttt

SEQ ID NO: 6969 - DNA, 84 bp, synthetic construct
  source 1..84: mol_type = other DNA
tttttttaagcagtggtatcaacgcagagtacnnggtggattnntacggcatnntttttttttttttttttttttttttttttt

SEQ ID NO: 6970 - DNA, 84 bp, synthetic construct
  source 1..84: mol_type = other DNA
tttttttaagcagtggtatcaacgcagagtacnnggtggattnnttggatcgnntttttttttttttttttttttttttttttt

SEQ ID NO: 6971 - DNA, 84 bp, synthetic construct
  source 1..84: mol_type = other DNA
tttttttaagcagtggtatcaacgcagagtacnnggtggattnntggaacganntttttttttttttttttttttttttttttt

SEQ ID NO: 6972 - DNA, 84 bp, synthetic construct
  source 1..84: mol_type = other DNA
tttttttaagcagtggtatcaacgcagagtacnnggtggattnnggcaatcanntttttttttttttttttttttttttttttt

SEQ ID NO: 6973 - DNA, 84 bp, synthetic construct
  source 1..84: mol_type = other DNA
tttttttaagcagtggtatcaacgcagagtacnnggtggattnngaatccganntttttttttttttttttttttttttttttt

SEQ ID NO: 6974 - DNA, 84 bp, synthetic construct
  source 1..84: mol_type = other DNA
tttttttaagcagtggtatcaacgcagagtacnnggtggattnnttacggtgnntttttttttttttttttttttttttttttt

SEQ ID NO: 6975 - DNA, 84 bp, synthetic construct
  source 1..84: mol_type = other DNA
tttttttaagcagtggtatcaacgcagagtacnnggtggattnncatatcggnntttttttttttttttttttttttttttttt

SEQ ID NO: 6976 - DNA, 84 bp, synthetic construct
  source 1..84: mol_type = other DNA
tttttttaagcagtggtatcaacgcagagtacnnggtggattnncttcggtanntttttttttttttttttttttttttttttt

SEQ ID NO: 6977 - DNA, 84 bp, synthetic construct
  source 1..84: mol_type = other DNA
tttttttaagcagtggtatcaacgcagagtacnnggtggattnntcctaacgnntttttttttttttttttttttttttttttt

SEQ ID NO: 6978 - DNA, 84 bp, synthetic construct
  source 1..84: mol_type = other DNA
tttttttaagcagtggtatcaacgcagagtacnnggtggattnngtaagccanntttttttttttttttttttttttttttttt

SEQ ID NO: 6979 - DNA, 84 bp, synthetic construct
  source 1..84: mol_type = other DNA
tttttttaagcagtggtatcaacgcagagtacnnggtggattnntaaggtggnntttttttttttttttttttttttttttttt

SEQ ID NO: 6980 - DNA, 84 bp, synthetic construct
  source 1..84: mol_type = other DNA
tttttttaagcagtggtatcaacgcagagtacnnggtggattnnggtaagctnntttttttttttttttttttttttttttttt

SEQ ID NO: 6981 - DNA, 84 bp, synthetic construct
  source 1..84: mol_type = other DNA
tttttttaagcagtggtatcaacgcagagtacnnggtggattnntgtgtcganntttttttttttttttttttttttttttttt

SEQ ID NO: 6982 - DNA, 84 bp, synthetic construct
  source 1..84: mol_type = other DNA
tttttttaagcagtggtatcaacgcagagtacnnggtggattnngagcatganntttttttttttttttttttttttttttttt

SEQ ID NO: 6983 - DNA, 84 bp, synthetic construct
  source 1..84: mol_type = other DNA
tttttttaagcagtggtatcaacgcagagtacnnggtggattnntcgaagtcnntttttttttttttttttttttttttttttt

SEQ ID NO: 6984 - DNA, 84 bp, synthetic construct
  source 1..84: mol_type = other DNA
tttttttaagcagtggtatcaacgcagagtacnnggtggattnnggtgaacanntttttttttttttttttttttttttttttt

SEQ ID NO: 6985 - DNA, 84 bp, synthetic construct
  source 1..84: mol_type = other DNA
tttttttaagcagtggtatcaacgcagagtacnnggtggattnnacatgcacnntttttttttttttttttttttttttttttt

SEQ ID NO: 6986 - DNA, 84 bp, synthetic construct
  source 1..84: mol_type = other DNA
tttttttaagcagtggtatcaacgcagagtacnnggtggattnnccaacagtnntttttttttttttttttttttttttttttt

SEQ ID NO: 6987 - DNA, 84 bp, synthetic construct
  source 1..84: mol_type = other DNA
tttttttaagcagtggtatcaacgcagagtacnnggtggattnnagaacagcnntttttttttttttttttttttttttttttt

SEQ ID NO: 6988 - DNA, 84 bp, synthetic construct
  source 1..84: mol_type = other DNA
tttttttaagcagtggtatcaacgcagagtacnnggtggattnngaacacgtnntttttttttttttttttttttttttttttt

SEQ ID NO: 6989 - DNA, 84 bp, synthetic construct
  source 1..84: mol_type = other DNA
tttttttaagcagtggtatcaacgcagagtacnnggtggattnnggtcttcanntttttttttttttttttttttttttttttt

SEQ ID NO: 6990 - DNA, 84 bp, synthetic construct
  source 1..84: mol_type = other DNA
tttttttaagcagtggtatcaacgcagagtacnnggtggattnnaggttcagnntttttttttttttttttttttttttttttt

SEQ ID NO: 6991 - DNA, 84 bp, synthetic construct
  source 1..84: mol_type = other DNA
tttttttaagcagtggtatcaacgcagagtacnnggtggattnnctagagcanntttttttttttttttttttttttttttttt

SEQ ID NO: 6992 - DNA, 84 bp, synthetic construct
  source 1..84: mol_type = other DNA
tttttttaagcagtggtatcaacgcagagtacnnggtggattnncttctagcnntttttttttttttttttttttttttttttt

SEQ ID NO: 6993 - DNA, 84 bp, synthetic construct
  source 1..84: mol_type = other DNA
tttttttaagcagtggtatcaacgcagagtacnnggtggattnngagtaacgnntttttttttttttttttttttttttttttt

SEQ ID NO: 6994 - DNA, 84 bp, synthetic construct
  source 1..84: mol_type = other DNA
tttttttaagcagtggtatcaacgcagagtacnnggtggattnnctaagaggnntttttttttttttttttttttttttttttt

SEQ ID NO: 6995 - DNA, 84 bp, synthetic construct
  source 1..84: mol_type = other DNA
tttttttaagcagtggtatcaacgcagagtacnnggtggattnnacgtgtagnntttttttttttttttttttttttttttttt

SEQ ID NO: 6996 - DNA, 84 bp, synthetic construct
  source 1..84: mol_type = other DNA
tttttttaagcagtggtatcaacgcagagtacnnggtggattnnactacaggnntttttttttttttttttttttttttttttt

SEQ ID NO: 6997 - DNA, 84 bp, synthetic construct
  source 1..84: mol_type = other DNA
tttttttaagcagtggtatcaacgcagagtacnnggtggattnntacaggtcnntttttttttttttttttttttttttttttt

SEQ ID NO: 6998 - DNA, 84 bp, synthetic construct
  source 1..84: mol_type = other DNA
tttttttaagcagtggtatcaacgcagagtacnnggtggattnnctcacatgnntttttttttttttttttttttttttttttt

SEQ ID NO: 6999 - DNA, 84 bp, synthetic construct
  source 1..84: mol_type = other DNA
tttttttaagcagtggtatcaacgcagagtacnnggtggattnnactaggagnntttttttttttttttttttttttttttttt

SEQ ID NO: 7000 - DNA, 84 bp, synthetic construct
  source 1..84: mol_type = other DNA
tttttttaagcagtggtatcaacgcagagtacnnggtggattnnccatagganntttttttttttttttttttttttttttttt

SEQ ID NO: 7001 - DNA, 84 bp, synthetic construct
  source 1..84: mol_type = other DNA
tttttttaagcagtggtatcaacgcagagtacnnggtggattnnggagaatcnntttttttttttttttttttttttttttttt

SEQ ID NO: 7002 - DNA, 84 bp, synthetic construct
  source 1..84: mol_type = other DNA
tttttttaagcagtggtatcaacgcagagtacnnggtggattnngccaagaanntttttttttttttttttttttttttttttt

SEQ ID NO: 7003 - DNA, 84 bp, synthetic construct
  source 1..84: mol_type = other DNA
tttttttaagcagtggtatcaacgcagagtacnnggtggattnnaaggcaagnntttttttttttttttttttttttttttttt

SEQ ID NO: 7004 - DNA, 84 bp, synthetic construct
  source 1..84: mol_type = other DNA
tttttttaagcagtggtatcaacgcagagtacnnggtggattnnaatgtcgcnntttttttttttttttttttttttttttttt

SEQ ID NO: 7005 - DNA, 84 bp, synthetic construct
  source 1..84: mol_type = other DNA
tttttttaagcagtggtatcaacgcagagtacnnggtggattnnatggaaccnntttttttttttttttttttttttttttttt

SEQ ID NO: 7006 - DNA, 84 bp, synthetic construct
  source 1..84: mol_type = other DNA
tttttttaagcagtggtatcaacgcagagtacnnggtggattnnagaggcatnntttttttttttttttttttttttttttttt

SEQ ID NO: 7007 - DNA, 84 bp, synthetic construct
  source 1..84: mol_type = other DNA
tttttttaagcagtggtatcaacgcagagtacnnggtggattnntgcatagcnntttttttttttttttttttttttttttttt

SEQ ID NO: 7008 - DNA, 84 bp, synthetic construct
  source 1..84: mol_type = other DNA
tttttttaagcagtggtatcaacgcagagtacnnggtggattnnctaacgganntttttttttttttttttttttttttttttt

SEQ ID NO: 7009 - DNA, 84 bp, synthetic construct
  source 1..84: mol_type = other DNA
tttttttaagcagtggtatcaacgcagagtacnnggtggattnntatcgaggnntttttttttttttttttttttttttttttt

SEQ ID NO: 7010 - DNA, 84 bp, synthetic construct
  source 1..84: mol_type = other DNA
tttttttaagcagtggtatcaacgcagagtacnnggtggattnncatagcctnntttttttttttttttttttttttttttttt

SEQ ID NO: 7011 - DNA, 84 bp, synthetic construct
  source 1..84: mol_type = other DNA
tttttttaagcagtggtatcaacgcagagtacnnggtggattnnatcgagacnntttttttttttttttttttttttttttttt

SEQ ID NO: 7012 - DNA, 84 bp, synthetic construct
  source 1..84: mol_type = other DNA
tttttttaagcagtggtatcaacgcagagtacnnggtggattnnggaagagtnntttttttttttttttttttttttttttttt

SEQ ID NO: 7013 - DNA, 84 bp, synthetic construct
  source 1..84: mol_type = other DNA
tttttttaagcagtggtatcaacgcagagtacnnggtggattnnccaagtagnntttttttttttttttttttttttttttttt

SEQ ID NO: 7014 - DNA, 84 bp, synthetic construct
  source 1..84: mol_type = other DNA
tttttttaagcagtggtatcaacgcagagtacnnggtggattnnctgaacagnntttttttttttttttttttttttttttttt

SEQ ID NO: 7015 - DNA, 84 bp, synthetic construct
  source 1..84: mol_type = other DNA
tttttttaagcagtggtatcaacgcagagtacnnggtggattnngtaggttcnntttttttttttttttttttttttttttttt

SEQ ID NO: 7016 - DNA, 84 bp, synthetic construct
  source 1..84: mol_type = other DNA
tttttttaagcagtggtatcaacgcagagtacnnggtggattnngtatggacnntttttttttttttttttttttttttttttt

SEQ ID NO: 7017 - DNA, 84 bp, synthetic construct
  source 1..84: mol_type = other DNA
tttttttaagcagtggtatcaacgcagagtacnnggtggattnntcgcaacanntttttttttttttttttttttttttttttt

SEQ ID NO: 7018 - DNA, 84 bp, synthetic construct
  source 1..84: mol_type = other DNA
tttttttaagcagtggtatcaacgcagagtacnnggtggattnnccgctaatnntttttttttttttttttttttttttttttt

SEQ ID NO: 7019 - DNA, 84 bp, synthetic construct
  source 1..84: mol_type = other DNA
tttttttaagcagtggtatcaacgcagagtacnnggtggattnngattcgcanntttttttttttttttttttttttttttttt

SEQ ID NO: 7020 - DNA, 84 bp, synthetic construct
  source 1..84: mol_type = other DNA
tttttttaagcagtggtatcaacgcagagtacnnggtggattnncgatggaanntttttttttttttttttttttttttttttt

SEQ ID NO: 7021 - DNA, 84 bp, synthetic construct
  source 1..84: mol_type = other DNA
tttttttaagcagtggtatcaacgcagagtacnnggtggattnnagcaagganntttttttttttttttttttttttttttttt

SEQ ID NO: 7022 - DNA, 84 bp, synthetic construct
  source 1..84: mol_type = other DNA
tttttttaagcagtggtatcaacgcagagtacnnggtggattnncgtagcaanntttttttttttttttttttttttttttttt

SEQ ID NO: 7023 - DNA, 84 bp, synthetic construct
  source 1..84: mol_type = other DNA
tttttttaagcagtggtatcaacgcagagtacnnggtggattnntggcagtanntttttttttttttttttttttttttttttt

SEQ ID NO: 7024 - DNA, 84 bp, synthetic construct
  source 1..84: mol_type = other DNA
tttttttaagcagtggtatcaacgcagagtacnnggtggattnncggtagttnntttttttttttttttttttttttttttttt

SEQ ID NO: 7025 - DNA, 84 bp, synthetic construct
  source 1..84: mol_type = other DNA
tttttttaagcagtggtatcaacgcagagtacnnggtggattnntgacttcgnntttttttttttttttttttttttttttttt

SEQ ID NO: 7026 - DNA, 84 bp, synthetic construct
  source 1..84: mol_type = other DNA
tttttttaagcagtggtatcaacgcagagtacnnggtggattnngagtgcaanntttttttttttttttttttttttttttttt

SEQ ID NO: 7027 - DNA, 84 bp, synthetic construct
  source 1..84: mol_type = other DNA
tttttttaagcagtggtatcaacgcagagtacnnggtggattnnacggtaacnntttttttttttttttttttttttttttttt

SEQ ID NO: 7028 - DNA, 84 bp, synthetic construct
  source 1..84: mol_type = other DNA
tttttttaagcagtggtatcaacgcagagtacnnggtggattnnaagtggtgnntttttttttttttttttttttttttttttt

SEQ ID NO: 7029 - DNA, 84 bp, synthetic construct
  source 1..84: mol_type = other DNA
tttttttaagcagtggtatcaacgcagagtacnnggtggattnnggagacaanntttttttttttttttttttttttttttttt

SEQ ID NO: 7030 - DNA, 84 bp, synthetic construct
  source 1..84: mol_type = other DNA
tttttttaagcagtggtatcaacgcagagtacnnggtggattnntcaaggacnntttttttttttttttttttttttttttttt

SEQ ID NO: 7031 - DNA, 84 bp, synthetic construct
  source 1..84: mol_type = other DNA
tttttttaagcagtggtatcaacgcagagtacnnggtggattnnaagagagcnntttttttttttttttttttttttttttttt

SEQ ID NO: 7032 - DNA, 84 bp, synthetic construct
  source 1..84: mol_type = other DNA
tttttttaagcagtggtatcaacgcagagtacnnggtggattnncgagagatnntttttttttttttttttttttttttttttt

SEQ ID NO: 7033 - DNA, 84 bp, synthetic construct
  source 1..84: mol_type = other DNA
tttttttaagcagtggtatcaacgcagagtacnnggtggattnnacagatggnntttttttttttttttttttttttttttttt

SEQ ID NO: 7034 - DNA, 84 bp, synthetic construct
  source 1..84: mol_type = other DNA
tttttttaagcagtggtatcaacgcagagtacnnggtggattnnaggagtcanntttttttttttttttttttttttttttttt

SEQ ID NO: 7035 - DNA, 84 bp, synthetic construct
  source 1..84: mol_type = other DNA
tttttttaagcagtggtatcaacgcagagtacnnggtggattnncgtgttacnntttttttttttttttttttttttttttttt

SEQ ID NO: 7036 - DNA, 84 bp, synthetic construct
  source 1..84: mol_type = other DNA
tttttttaagcagtggtatcaacgcagagtacnnggtggattnntagtgtgcnntttttttttttttttttttttttttttttt

SEQ ID NO: 7037 - DNA, 84 bp, synthetic construct
  source 1..84: mol_type = other DNA
tttttttaagcagtggtatcaacgcagagtacnnggtggattnnctcatgacnntttttttttttttttttttttttttttttt

SEQ ID NO: 7038 - DNA, 84 bp, synthetic construct
  source 1..84: mol_type = other DNA
tttttttaagcagtggtatcaacgcagagtacnnggtggattnngtatccagnntttttttttttttttttttttttttttttt

SEQ ID NO: 7039 - DNA, 84 bp, synthetic construct
  source 1..84: mol_type = other DNA
tttttttaagcagtggtatcaacgcagagtacnnggtggattnnacgcctatnntttttttttttttttttttttttttttttt

SEQ ID NO: 7040 - DNA, 84 bp, synthetic construct
  source 1..84: mol_type = other DNA
tttttttaagcagtggtatcaacgcagagtacnnggtggattnnaacgacctnntttttttttttttttttttttttttttttt

SEQ ID NO: 7041 - DNA, 84 bp, synthetic construct
  source 1..84: mol_type = other DNA
tttttttaagcagtggtatcaacgcagagtacnnggtggattnnatcaggctnntttttttttttttttttttttttttttttt

SEQ ID NO: 7042 - DNA, 84 bp, synthetic construct
  source 1..84: mol_type = other DNA
tttttttaagcagtggtatcaacgcagagtacnnggtggattnncaagttcgnntttttttttttttttttttttttttttttt

SEQ ID NO: 7043 - DNA, 84 bp, synthetic construct
  source 1..84: mol_type = other DNA
tttttttaagcagtggtatcaacgcagagtacnnggtggattnntagccaganntttttttttttttttttttttttttttttt

SEQ ID NO: 7044 - DNA, 84 bp, synthetic construct
  source 1..84: mol_type = other DNA
tttttttaagcagtggtatcaacgcagagtacnnggtggattnncaatcacgnntttttttttttttttttttttttttttttt

SEQ ID NO: 7045 - DNA, 84 bp, synthetic construct
  source 1..84: mol_type = other DNA
tttttttaagcagtggtatcaacgcagagtacnnggtggattnngcaacaagnntttttttttttttttttttttttttttttt

SEQ ID NO: 7046 - DNA, 84 bp, synthetic construct
  source 1..84: mol_type = other DNA
tttttttaagcagtggtatcaacgcagagtacnnggtggattnncacgacaanntttttttttttttttttttttttttttttt

SEQ ID NO: 7047 - DNA, 84 bp, synthetic construct
  source 1..84: mol_type = other DNA
tttttttaagcagtggtatcaacgcagagtacnnggtggattnntacggaganntttttttttttttttttttttttttttttt

SEQ ID NO: 7048 - DNA, 84 bp, synthetic construct
  source 1..84: mol_type = other DNA
tttttttaagcagtggtatcaacgcagagtacnnggtggattnncgacaaganntttttttttttttttttttttttttttttt

SEQ ID NO: 7049 - DNA, 84 bp, synthetic construct
  source 1..84: mol_type = other DNA
tttttttaagcagtggtatcaacgcagagtacnnggtggattnncgaagtganntttttttttttttttttttttttttttttt

SEQ ID NO: 7050 - DNA, 84 bp, synthetic construct
  source 1..84: mol_type = other DNA
tttttttaagcagtggtatcaacgcagagtacnnggtggattnnagctggtanntttttttttttttttttttttttttttttt

SEQ ID NO: 7051 - DNA, 84 bp, synthetic construct
  source 1..84: mol_type = other DNA
tttttttaagcagtggtatcaacgcagagtacnnggtggattnnaactaggcnntttttttttttttttttttttttttttttt

SEQ ID NO: 7052 - DNA, 84 bp, synthetic construct
  source 1..84: mol_type = other DNA
tttttttaagcagtggtatcaacgcagagtacnnggtggattnncagcaagtnntttttttttttttttttttttttttttttt

SEQ ID NO: 7053 - DNA, 84 bp, synthetic construct
  source 1..84: mol_type = other DNA
tttttttaagcagtggtatcaacgcagagtacnnggtggattnnacgaggtanntttttttttttttttttttttttttttttt

SEQ ID NO: 7054 - DNA, 84 bp, synthetic construct
  source 1..84: mol_type = other DNA
tttttttaagcagtggtatcaacgcagagtacnnggtggattnncatcttccnntttttttttttttttttttttttttttttt

SEQ ID NO: 7055 - DNA, 84 bp, synthetic construct
  source 1..84: mol_type = other DNA
tttttttaagcagtggtatcaacgcagagtacnnggtggattnncctgaatcnntttttttttttttttttttttttttttttt

SEQ ID NO: 7056 - DNA, 84 bp, synthetic construct
  source 1..84: mol_type = other DNA
tttttttaagcagtggtatcaacgcagagtacnnggtggattnntgcagactnntttttttttttttttttttttttttttttt

SEQ ID NO: 7057 - DNA, 84 bp, synthetic construct
  source 1..84: mol_type = other DNA
tttttttaagcagtggtatcaacgcagagtacnnggtggattnnagatgtggnntttttttttttttttttttttttttttttt

SEQ ID NO: 7058 - DNA, 84 bp, synthetic construct
  source 1..84: mol_type = other DNA
tttttttaagcagtggtatcaacgcagagtacnnggtggattnnagttcgacnntttttttttttttttttttttttttttttt

SEQ ID NO: 7059 - DNA, 84 bp, synthetic construct
  source 1..84: mol_type = other DNA
tttttttaagcagtggtatcaacgcagagtacnnggtggattnnacaacctcnntttttttttttttttttttttttttttttt

SEQ ID NO: 7060 - DNA, 84 bp, synthetic construct
  source 1..84: mol_type = other DNA
tttttttaagcagtggtatcaacgcagagtacnnggtggattnncatggtagnntttttttttttttttttttttttttttttt

SEQ ID NO: 7061 - DNA, 84 bp, synthetic construct
  source 1..84: mol_type = other DNA
tttttttaagcagtggtatcaacgcagagtacnnggtggattnncgtatctcnntttttttttttttttttttttttttttttt

SEQ ID NO: 7062 - DNA, 84 bp, synthetic construct
  source 1..84: mol_type = other DNA
tttttttaagcagtggtatcaacgcagagtacnnggtggattnncctagttcnntttttttttttttttttttttttttttttt

SEQ ID NO: 7063 - DNA, 84 bp, synthetic construct
  source 1..84: mol_type = other DNA
tttttttaagcagtggtatcaacgcagagtacnnggtggattnncaagagtcnntttttttttttttttttttttttttttttt

SEQ ID NO: 7064 - DNA, 84 bp, synthetic construct
  source 1..84: mol_type = other DNA
tttttttaagcagtggtatcaacgcagagtacnnggctaagannaatcggcanntttttttttttttttttttttttttttttt

SEQ ID NO: 7065 - DNA, 84 bp, synthetic construct
  source 1..84: mol_type = other DNA
tttttttaagcagtggtatcaacgcagagtacnnggctaaganntacggcatnntttttttttttttttttttttttttttttt

SEQ ID NO: 7066 - DNA, 84 bp, synthetic construct
  source 1..84: mol_type = other DNA
tttttttaagcagtggtatcaacgcagagtacnnggctaagannttggatcgnntttttttttttttttttttttttttttttt

SEQ ID NO: 7067 - DNA, 84 bp, synthetic construct
  source 1..84: mol_type = other DNA
tttttttaagcagtggtatcaacgcagagtacnnggctaaganntggaacganntttttttttttttttttttttttttttttt

SEQ ID NO: 7068 - DNA, 84 bp, synthetic construct
  source 1..84: mol_type = other DNA
tttttttaagcagtggtatcaacgcagagtacnnggctaagannggcaatcanntttttttttttttttttttttttttttttt

SEQ ID NO: 7069 - DNA, 84 bp, synthetic construct
  source 1..84: mol_type = other DNA
tttttttaagcagtggtatcaacgcagagtacnnggctaaganngaatccganntttttttttttttttttttttttttttttt

SEQ ID NO: 7070 - DNA, 84 bp, synthetic construct
  source 1..84: mol_type = other DNA
tttttttaagcagtggtatcaacgcagagtacnnggctaagannttacggtgnntttttttttttttttttttttttttttttt

SEQ ID NO: 7071 - DNA, 84 bp, synthetic construct
  source 1..84: mol_type = other DNA
tttttttaagcagtggtatcaacgcagagtacnnggctaaganncatatcggnntttttttttttttttttttttttttttttt

SEQ ID NO: 7072 - DNA, 84 bp, synthetic construct
  source 1..84: mol_type = other DNA
tttttttaagcagtggtatcaacgcagagtacnnggctaaganncttcggtanntttttttttttttttttttttttttttttt

SEQ ID NO: 7073 - DNA, 84 bp, synthetic construct
  source 1..84: mol_type = other DNA
tttttttaagcagtggtatcaacgcagagtacnnggctaaganntcctaacgnntttttttttttttttttttttttttttttt

SEQ ID NO: 7074 - DNA, 84 bp, synthetic construct
  source 1..84: mol_type = other DNA
tttttttaagcagtggtatcaacgcagagtacnnggctaaganngtaagccanntttttttttttttttttttttttttttttt

SEQ ID NO: 7075 - DNA, 84 bp, synthetic construct
  source 1..84: mol_type = other DNA
tttttttaagcagtggtatcaacgcagagtacnnggctaaganntaaggtggnntttttttttttttttttttttttttttttt

SEQ ID NO: 7076 - DNA, 84 bp, synthetic construct
  source 1..84: mol_type = other DNA
tttttttaagcagtggtatcaacgcagagtacnnggctaagannggtaagctnntttttttttttttttttttttttttttttt

SEQ ID NO: 7077 - DNA, 84 bp, synthetic construct
  source 1..84: mol_type = other DNA
tttttttaagcagtggtatcaacgcagagtacnnggctaaganntgtgtcganntttttttttttttttttttttttttttttt

SEQ ID NO: 7078 - DNA, 84 bp, synthetic construct
  source 1..84: mol_type = other DNA
tttttttaagcagtggtatcaacgcagagtacnnggctaaganngagcatganntttttttttttttttttttttttttttttt

SEQ ID NO: 7079 - DNA, 84 bp, synthetic construct
  source 1..84: mol_type = other DNA
tttttttaagcagtggtatcaacgcagagtacnnggctaaganntcgaagtcnntttttttttttttttttttttttttttttt

SEQ ID NO: 7080 - DNA, 84 bp, synthetic construct
  source 1..84: mol_type = other DNA
tttttttaagcagtggtatcaacgcagagtacnnggctaagannggtgaacanntttttttttttttttttttttttttttttt

SEQ ID NO: 7081 - DNA, 84 bp, synthetic construct
  source 1..84: mol_type = other DNA
tttttttaagcagtggtatcaacgcagagtacnnggctaagannacatgcacnntttttttttttttttttttttttttttttt

SEQ ID NO: 7082 - DNA, 84 bp, synthetic construct
  source 1..84: mol_type = other DNA
tttttttaagcagtggtatcaacgcagagtacnnggctaagannccaacagtnntttttttttttttttttttttttttttttt

SEQ ID NO: 7083 - DNA, 84 bp, synthetic construct
  source 1..84: mol_type = other DNA
tttttttaagcagtggtatcaacgcagagtacnnggctaagannagaacagcnntttttttttttttttttttttttttttttt

SEQ ID NO: 7084 - DNA, 84 bp, synthetic construct
  source 1..84: mol_type = other DNA
tttttttaagcagtggtatcaacgcagagtacnnggctaaganngaacacgtnntttttttttttttttttttttttttttttt

SEQ ID NO: 7085 - DNA, 84 bp, synthetic construct
  source 1..84: mol_type = other DNA
tttttttaagcagtggtatcaacgcagagtacnnggctaagannggtcttcanntttttttttttttttttttttttttttttt

SEQ ID NO: 7086 - DNA, 84 bp, synthetic construct
  source 1..84: mol_type = other DNA
tttttttaagcagtggtatcaacgcagagtacnnggctaagannaggttcagnntttttttttttttttttttttttttttttt

SEQ ID NO: 7087 - DNA, 84 bp, synthetic construct
  source 1..84: mol_type = other DNA
tttttttaagcagtggtatcaacgcagagtacnnggctaagannctagagcanntttttttttttttttttttttttttttttt

SEQ ID NO: 7088 - DNA, 84 bp, synthetic construct
  source 1..84: mol_type = other DNA
tttttttaagcagtggtatcaacgcagagtacnnggctaaganncttctagcnntttttttttttttttttttttttttttttt

SEQ ID NO: 7089 - DNA, 84 bp, synthetic construct
  source 1..84: mol_type = other DNA
tttttttaagcagtggtatcaacgcagagtacnnggctaaganngagtaacgnntttttttttttttttttttttttttttttt

SEQ ID NO: 7090 - DNA, 84 bp, synthetic construct
  source 1..84: mol_type = other DNA
tttttttaagcagtggtatcaacgcagagtacnnggctaagannctaagaggnntttttttttttttttttttttttttttttt

SEQ ID NO: 7091 - DNA, 84 bp, synthetic construct
  source 1..84: mol_type = other DNA
tttttttaagcagtggtatcaacgcagagtacnnggctaagannacgtgtagnntttttttttttttttttttttttttttttt

SEQ ID NO: 7092 - DNA, 84 bp, synthetic construct
  source 1..84: mol_type = other DNA
tttttttaagcagtggtatcaacgcagagtacnnggctaagannactacaggnntttttttttttttttttttttttttttttt

SEQ ID NO: 7093 - DNA, 84 bp, synthetic construct
  source 1..84: mol_type = other DNA
tttttttaagcagtggtatcaacgcagagtacnnggctaaganntacaggtcnntttttttttttttttttttttttttttttt

SEQ ID NO: 7094 - DNA, 84 bp, synthetic construct
  source 1..84: mol_type = other DNA
tttttttaagcagtggtatcaacgcagagtacnnggctaagannctcacatgnntttttttttttttttttttttttttttttt

SEQ ID NO: 7095 - DNA, 84 bp, synthetic construct
  source 1..84: mol_type = other DNA
tttttttaagcagtggtatcaacgcagagtacnnggctaagannactaggagnntttttttttttttttttttttttttttttt

SEQ ID NO: 7096 - DNA, 84 bp, synthetic construct
  source 1..84: mol_type = other DNA
tttttttaagcagtggtatcaacgcagagtacnnggctaagannccatagganntttttttttttttttttttttttttttttt

SEQ ID NO: 7097 - DNA, 84 bp, synthetic construct
  source 1..84: mol_type = other DNA
tttttttaagcagtggtatcaacgcagagtacnnggctaagannggagaatcnntttttttttttttttttttttttttttttt

SEQ ID NO: 7098 - DNA, 84 bp, synthetic construct
  source 1..84: mol_type = other DNA
tttttttaagcagtggtatcaacgcagagtacnnggctaaganngccaagaanntttttttttttttttttttttttttttttt

SEQ ID NO: 7099 - DNA, 84 bp, synthetic construct
  source 1..84: mol_type = other DNA
tttttttaagcagtggtatcaacgcagagtacnnggctaagannaaggcaagnntttttttttttttttttttttttttttttt

SEQ ID NO: 7100 - DNA, 84 bp, synthetic construct
  source 1..84: mol_type = other DNA
tttttttaagcagtggtatcaacgcagagtacnnggctaagannaatgtcgcnntttttttttttttttttttttttttttttt

SEQ ID NO: 7101 - DNA, 84 bp, synthetic construct
  source 1..84: mol_type = other DNA
tttttttaagcagtggtatcaacgcagagtacnnggctaagannatggaaccnntttttttttttttttttttttttttttttt

SEQ ID NO: 7102 - DNA, 84 bp, synthetic construct
  source 1..84: mol_type = other DNA
tttttttaagcagtggtatcaacgcagagtacnnggctaagannagaggcatnntttttttttttttttttttttttttttttt

SEQ ID NO: 7103 - DNA, 84 bp, synthetic construct
  source 1..84: mol_type = other DNA
tttttttaagcagtggtatcaacgcagagtacnnggctaaganntgcatagcnntttttttttttttttttttttttttttttt

SEQ ID NO: 7104 - DNA, 84 bp, synthetic construct
  source 1..84: mol_type = other DNA
tttttttaagcagtggtatcaacgcagagtacnnggctaagannctaacgganntttttttttttttttttttttttttttttt

SEQ ID NO: 7105 - DNA, 84 bp, synthetic construct
  source 1..84: mol_type = other DNA
tttttttaagcagtggtatcaacgcagagtacnnggctaaganntatcgaggnntttttttttttttttttttttttttttttt

SEQ ID NO: 7106 - DNA, 84 bp, synthetic construct
  source 1..84: mol_type = other DNA
tttttttaagcagtggtatcaacgcagagtacnnggctaaganncatagcctnntttttttttttttttttttttttttttttt

SEQ ID NO: 7107 - DNA, 84 bp, synthetic construct
  source 1..84: mol_type = other DNA
tttttttaagcagtggtatcaacgcagagtacnnggctaagannatcgagacnntttttttttttttttttttttttttttttt

SEQ ID NO: 7108 - DNA, 84 bp, synthetic construct
  source 1..84: mol_type = other DNA
tttttttaagcagtggtatcaacgcagagtacnnggctaagannggaagagtnntttttttttttttttttttttttttttttt

SEQ ID NO: 7109 - DNA, 84 bp, synthetic construct
  source 1..84: mol_type = other DNA
tttttttaagcagtggtatcaacgcagagtacnnggctaagannccaagtagnntttttttttttttttttttttttttttttt

SEQ ID NO: 7110 - DNA, 84 bp, synthetic construct
  source 1..84: mol_type = other DNA
tttttttaagcagtggtatcaacgcagagtacnnggctaagannctgaacagnntttttttttttttttttttttttttttttt

SEQ ID NO: 7111 - DNA, 84 bp, synthetic construct
  source 1..84: mol_type = other DNA
tttttttaagcagtggtatcaacgcagagtacnnggctaaganngtaggttcnntttttttttttttttttttttttttttttt

SEQ ID NO: 7112 - DNA, 84 bp, synthetic construct
  source 1..84: mol_type = other DNA
tttttttaagcagtggtatcaacgcagagtacnnggctaaganngtatggacnntttttttttttttttttttttttttttttt

SEQ ID NO: 7113 - DNA, 84 bp, synthetic construct
  source 1..84: mol_type = other DNA
tttttttaagcagtggtatcaacgcagagtacnnggctaaganntcgcaacanntttttttttttttttttttttttttttttt

SEQ ID NO: 7114 - DNA, 84 bp, synthetic construct
  source 1..84: mol_type = other DNA
tttttttaagcagtggtatcaacgcagagtacnnggctaagannccgctaatnntttttttttttttttttttttttttttttt

SEQ ID NO: 7115 - DNA, 84 bp, synthetic construct
  source 1..84: mol_type = other DNA
tttttttaagcagtggtatcaacgcagagtacnnggctaaganngattcgcanntttttttttttttttttttttttttttttt

SEQ ID NO: 7116 - DNA, 84 bp, synthetic construct
  source 1..84: mol_type = other DNA
tttttttaagcagtggtatcaacgcagagtacnnggctaaganncgatggaanntttttttttttttttttttttttttttttt

SEQ ID NO: 7117 - DNA, 84 bp, synthetic construct
  source 1..84: mol_type = other DNA
tttttttaagcagtggtatcaacgcagagtacnnggctaagannagcaagganntttttttttttttttttttttttttttttt

SEQ ID NO: 7118 - DNA, 84 bp, synthetic construct
  source 1..84: mol_type = other DNA
tttttttaagcagtggtatcaacgcagagtacnnggctaaganncgtagcaanntttttttttttttttttttttttttttttt

SEQ ID NO: 7119 - DNA, 84 bp, synthetic construct
  source 1..84: mol_type = other DNA
tttttttaagcagtggtatcaacgcagagtacnnggctaaganntggcagtanntttttttttttttttttttttttttttttt

SEQ ID NO: 7120 - DNA, 84 bp, synthetic construct
  source 1..84: mol_type = other DNA
tttttttaagcagtggtatcaacgcagagtacnnggctaaganncggtagttnntttttttttttttttttttttttttttttt

SEQ ID NO: 7121 - DNA, 84 bp, synthetic construct
  source 1..84: mol_type = other DNA
tttttttaagcagtggtatcaacgcagagtacnnggctaaganntgacttcgnntttttttttttttttttttttttttttttt

SEQ ID NO: 7122 - DNA, 84 bp, synthetic construct
  source 1..84: mol_type = other DNA
tttttttaagcagtggtatcaacgcagagtacnnggctaaganngagtgcaanntttttttttttttttttttttttttttttt

SEQ ID NO: 7123 - DNA, 84 bp, synthetic construct
  source 1..84: mol_type = other DNA
tttttttaagcagtggtatcaacgcagagtacnnggctaagannacggtaacnntttttttttttttttttttttttttttttt

SEQ ID NO: 7124 - DNA, 84 bp, synthetic construct
  source 1..84: mol_type = other DNA
tttttttaagcagtggtatcaacgcagagtacnnggctaagannaagtggtgnntttttttttttttttttttttttttttttt

SEQ ID NO: 7125 - DNA, 84 bp, synthetic construct
  source 1..84: mol_type = other DNA
tttttttaagcagtggtatcaacgcagagtacnnggctaagannggagacaanntttttttttttttttttttttttttttttt

SEQ ID NO: 7126 - DNA, 84 bp, synthetic construct
  source 1..84: mol_type = other DNA
tttttttaagcagtggtatcaacgcagagtacnnggctaaganntcaaggacnntttttttttttttttttttttttttttttt

SEQ ID NO: 7127 - DNA, 84 bp, synthetic construct
  source 1..84: mol_type = other DNA
tttttttaagcagtggtatcaacgcagagtacnnggctaagannaagagagcnntttttttttttttttttttttttttttttt

SEQ ID NO: 7128 - DNA, 84 bp, synthetic construct
  source 1..84: mol_type = other DNA
tttttttaagcagtggtatcaacgcagagtacnnggctaaganncgagagatnntttttttttttttttttttttttttttttt

SEQ ID NO: 7129 - DNA, 84 bp, synthetic construct
  source 1..84: mol_type = other DNA
tttttttaagcagtggtatcaacgcagagtacnnggctaagannacagatggnntttttttttttttttttttttttttttttt

SEQ ID NO: 7130 - DNA, 84 bp, synthetic construct
  source 1..84: mol_type = other DNA
tttttttaagcagtggtatcaacgcagagtacnnggctaagannaggagtcanntttttttttttttttttttttttttttttt

SEQ ID NO: 7131 - DNA, 84 bp, synthetic construct
  source 1..84: mol_type = other DNA
tttttttaagcagtggtatcaacgcagagtacnnggctaaganncgtgttacnntttttttttttttttttttttttttttttt

SEQ ID NO: 7132 - DNA, 84 bp, synthetic construct
  source 1..84: mol_type = other DNA
tttttttaagcagtggtatcaacgcagagtacnnggctaaganntagtgtgcnntttttttttttttttttttttttttttttt

SEQ ID NO: 7133 - DNA, 84 bp, synthetic construct
  source 1..84: mol_type = other DNA
tttttttaagcagtggtatcaacgcagagtacnnggctaagannctcatgacnntttttttttttttttttttttttttttttt

SEQ ID NO: 7134 - DNA, 84 bp, synthetic construct
  source 1..84: mol_type = other DNA
tttttttaagcagtggtatcaacgcagagtacnnggctaaganngtatccagnntttttttttttttttttttttttttttttt

SEQ ID NO: 7135 - DNA, 84 bp, synthetic construct
  source 1..84: mol_type = other DNA
tttttttaagcagtggtatcaacgcagagtacnnggctaagannacgcctatnntttttttttttttttttttttttttttttt

SEQ ID NO: 7136 - DNA, 84 bp, synthetic construct
  source 1..84: mol_type = other DNA
tttttttaagcagtggtatcaacgcagagtacnnggctaagannaacgacctnntttttttttttttttttttttttttttttt

SEQ ID NO: 7137 - DNA, 84 bp, synthetic construct
  source 1..84: mol_type = other DNA
tttttttaagcagtggtatcaacgcagagtacnnggctaagannatcaggctnntttttttttttttttttttttttttttttt

SEQ ID NO: 7138 - DNA, 84 bp, synthetic construct
  source 1..84: mol_type = other DNA
tttttttaagcagtggtatcaacgcagagtacnnggctaaganncaagttcgnntttttttttttttttttttttttttttttt

SEQ ID NO: 7139 - DNA, 84 bp, synthetic construct
  source 1..84: mol_type = other DNA
tttttttaagcagtggtatcaacgcagagtacnnggctaaganntagccaganntttttttttttttttttttttttttttttt

SEQ ID NO: 7140 - DNA, 84 bp, synthetic construct
  source 1..84: mol_type = other DNA
tttttttaagcagtggtatcaacgcagagtacnnggctaaganncaatcacgnntttttttttttttttttttttttttttttt

SEQ ID NO: 7141 - DNA, 84 bp, synthetic construct
  source 1..84: mol_type = other DNA
tttttttaagcagtggtatcaacgcagagtacnnggctaaganngcaacaagnntttttttttttttttttttttttttttttt

SEQ ID NO: 7142 - DNA, 84 bp, synthetic construct
  source 1..84: mol_type = other DNA
tttttttaagcagtggtatcaacgcagagtacnnggctaaganncacgacaanntttttttttttttttttttttttttttttt

SEQ ID NO: 7143 - DNA, 84 bp, synthetic construct
  source 1..84: mol_type = other DNA
tttttttaagcagtggtatcaacgcagagtacnnggctaaganntacggaganntttttttttttttttttttttttttttttt

SEQ ID NO: 7144 - DNA, 84 bp, synthetic construct
  source 1..84: mol_type = other DNA
tttttttaagcagtggtatcaacgcagagtacnnggctaaganncgacaaganntttttttttttttttttttttttttttttt

SEQ ID NO: 7145 - DNA, 84 bp, synthetic construct
  source 1..84: mol_type = other DNA
tttttttaagcagtggtatcaacgcagagtacnnggctaaganncgaagtganntttttttttttttttttttttttttttttt

SEQ ID NO: 7146 - DNA, 84 bp, synthetic construct
  source 1..84: mol_type = other DNA
tttttttaagcagtggtatcaacgcagagtacnnggctaagannagctggtanntttttttttttttttttttttttttttttt

SEQ ID NO: 7147 - DNA, 84 bp, synthetic construct
  source 1..84: mol_type = other DNA
tttttttaagcagtggtatcaacgcagagtacnnggctaagannaactaggcnntttttttttttttttttttttttttttttt

SEQ ID NO: 7148 - DNA, 84 bp, synthetic construct
  source 1..84: mol_type = other DNA
tttttttaagcagtggtatcaacgcagagtacnnggctaaganncagcaagtnntttttttttttttttttttttttttttttt

SEQ ID NO: 7149 - DNA, 84 bp, synthetic construct
  source 1..84: mol_type = other DNA
tttttttaagcagtggtatcaacgcagagtacnnggctaagannacgaggtanntttttttttttttttttttttttttttttt

SEQ ID NO: 7150 - DNA, 84 bp, synthetic construct
  source 1..84: mol_type = other DNA
tttttttaagcagtggtatcaacgcagagtacnnggctaaganncatcttccnntttttttttttttttttttttttttttttt

SEQ ID NO: 7151 - DNA, 84 bp, synthetic construct
  source 1..84: mol_type = other DNA
tttttttaagcagtggtatcaacgcagagtacnnggctaaganncctgaatcnntttttttttttttttttttttttttttttt

SEQ ID NO: 7152 - DNA, 84 bp, synthetic construct
  source 1..84: mol_type = other DNA
tttttttaagcagtggtatcaacgcagagtacnnggctaaganntgcagactnntttttttttttttttttttttttttttttt

SEQ ID NO: 7153 - DNA, 84 bp, synthetic construct
  source 1..84: mol_type = other DNA
tttttttaagcagtggtatcaacgcagagtacnnggctaagannagatgtggnntttttttttttttttttttttttttttttt

SEQ ID NO: 7154 - DNA, 84 bp, synthetic construct
  source 1..84: mol_type = other DNA
tttttttaagcagtggtatcaacgcagagtacnnggctaagannagttcgacnntttttttttttttttttttttttttttttt

SEQ ID NO: 7155 - DNA, 84 bp, synthetic construct
  source 1..84: mol_type = other DNA
tttttttaagcagtggtatcaacgcagagtacnnggctaagannacaacctcnntttttttttttttttttttttttttttttt

SEQ ID NO: 7156 - DNA, 84 bp, synthetic construct
  source 1..84: mol_type = other DNA
tttttttaagcagtggtatcaacgcagagtacnnggctaaganncatggtagnntttttttttttttttttttttttttttttt

SEQ ID NO: 7157 - DNA, 84 bp, synthetic construct
  source 1..84: mol_type = other DNA
tttttttaagcagtggtatcaacgcagagtacnnggctaaganncgtatctcnntttttttttttttttttttttttttttttt

SEQ ID NO: 7158 - DNA, 84 bp, synthetic construct
  source 1..84: mol_type = other DNA
tttttttaagcagtggtatcaacgcagagtacnnggctaaganncctagttcnntttttttttttttttttttttttttttttt

SEQ ID NO: 7159 - DNA, 84 bp, synthetic construct
  source 1..84: mol_type = other DNA
tttttttaagcagtggtatcaacgcagagtacnnggctaaganncaagagtcnntttttttttttttttttttttttttttttt

SEQ ID NO: 7160 - DNA, 84 bp, synthetic construct
  source 1..84: mol_type = other DNA
tttttttaagcagtggtatcaacgcagagtacnnttagaggcnnaatcggcanntttttttttttttttttttttttttttttt

SEQ ID NO: 7161 - DNA, 84 bp, synthetic construct
  source 1..84: mol_type = other DNA
tttttttaagcagtggtatcaacgcagagtacnnttagaggcnntacggcatnntttttttttttttttttttttttttttttt

SEQ ID NO: 7162 - DNA, 84 bp, synthetic construct
  source 1..84: mol_type = other DNA
tttttttaagcagtggtatcaacgcagagtacnnttagaggcnnttggatcgnntttttttttttttttttttttttttttttt

SEQ ID NO: 7163 - DNA, 84 bp, synthetic construct
  source 1..84: mol_type = other DNA
tttttttaagcagtggtatcaacgcagagtacnnttagaggcnntggaacganntttttttttttttttttttttttttttttt

SEQ ID NO: 7164 - DNA, 84 bp, synthetic construct
  source 1..84: mol_type = other DNA
tttttttaagcagtggtatcaacgcagagtacnnttagaggcnnggcaatcanntttttttttttttttttttttttttttttt

SEQ ID NO: 7165 - DNA, 84 bp, synthetic construct
  source 1..84: mol_type = other DNA
tttttttaagcagtggtatcaacgcagagtacnnttagaggcnngaatccganntttttttttttttttttttttttttttttt

SEQ ID NO: 7166 - DNA, 84 bp, synthetic construct
  source 1..84: mol_type = other DNA
tttttttaagcagtggtatcaacgcagagtacnnttagaggcnnttacggtgnntttttttttttttttttttttttttttttt

SEQ ID NO: 7167 - DNA, 84 bp, synthetic construct
  source 1..84: mol_type = other DNA
tttttttaagcagtggtatcaacgcagagtacnnttagaggcnncatatcggnntttttttttttttttttttttttttttttt

SEQ ID NO: 7168 - DNA, 84 bp, synthetic construct
  source 1..84: mol_type = other DNA
tttttttaagcagtggtatcaacgcagagtacnnttagaggcnncttcggtanntttttttttttttttttttttttttttttt

SEQ ID NO: 7169 - DNA, 84 bp, synthetic construct
  source 1..84: mol_type = other DNA
tttttttaagcagtggtatcaacgcagagtacnnttagaggcnntcctaacgnntttttttttttttttttttttttttttttt

SEQ ID NO: 7170 - DNA, 84 bp, synthetic construct
  source 1..84: mol_type = other DNA
tttttttaagcagtggtatcaacgcagagtacnnttagaggcnngtaagccanntttttttttttttttttttttttttttttt

SEQ ID NO: 7171 - DNA, 84 bp, synthetic construct
  source 1..84: mol_type = other DNA
tttttttaagcagtggtatcaacgcagagtacnnttagaggcnntaaggtggnntttttttttttttttttttttttttttttt

SEQ ID NO: 7172 - DNA, 84 bp, synthetic construct
  source 1..84: mol_type = other DNA
tttttttaagcagtggtatcaacgcagagtacnnttagaggcnnggtaagctnntttttttttttttttttttttttttttttt

SEQ ID NO: 7173 - DNA, 84 bp, synthetic construct
  source 1..84: mol_type = other DNA
tttttttaagcagtggtatcaacgcagagtacnnttagaggcnntgtgtcganntttttttttttttttttttttttttttttt

SEQ ID NO: 7174 - DNA, 84 bp, synthetic construct
  source 1..84: mol_type = other DNA
tttttttaagcagtggtatcaacgcagagtacnnttagaggcnngagcatganntttttttttttttttttttttttttttttt

SEQ ID NO: 7175 - DNA, 84 bp, synthetic construct
  source 1..84: mol_type = other DNA
tttttttaagcagtggtatcaacgcagagtacnnttagaggcnntcgaagtcnntttttttttttttttttttttttttttttt

SEQ ID NO: 7176 - DNA, 84 bp, synthetic construct
  source 1..84: mol_type = other DNA
tttttttaagcagtggtatcaacgcagagtacnnttagaggcnnggtgaacanntttttttttttttttttttttttttttttt

SEQ ID NO: 7177 - DNA, 84 bp, synthetic construct
  source 1..84: mol_type = other DNA
tttttttaagcagtggtatcaacgcagagtacnnttagaggcnnacatgcacnntttttttttttttttttttttttttttttt

SEQ ID NO: 7178 - DNA, 84 bp, synthetic construct
  source 1..84: mol_type = other DNA
tttttttaagcagtggtatcaacgcagagtacnnttagaggcnnccaacagtnntttttttttttttttttttttttttttttt

SEQ ID NO: 7179 - DNA, 84 bp, synthetic construct
  source 1..84: mol_type = other DNA
tttttttaagcagtggtatcaacgcagagtacnnttagaggcnnagaacagcnntttttttttttttttttttttttttttttt

SEQ ID NO: 7180 - DNA, 84 bp, synthetic construct
  source 1..84: mol_type = other DNA
tttttttaagcagtggtatcaacgcagagtacnnttagaggcnngaacacgtnntttttttttttttttttttttttttttttt

SEQ ID NO: 7181 - DNA, 84 bp, synthetic construct
  source 1..84: mol_type = other DNA
tttttttaagcagtggtatcaacgcagagtacnnttagaggcnnggtcttcanntttttttttttttttttttttttttttttt

SEQ ID NO: 7182 - DNA, 84 bp, synthetic construct
  source 1..84: mol_type = other DNA
tttttttaagcagtggtatcaacgcagagtacnnttagaggcnnaggttcagnntttttttttttttttttttttttttttttt

SEQ ID NO: 7183 - DNA, 84 bp, synthetic construct
  source 1..84: mol_type = other DNA
tttttttaagcagtggtatcaacgcagagtacnnttagaggcnnctagagcanntttttttttttttttttttttttttttttt

SEQ ID NO: 7184 - DNA, 84 bp, synthetic construct
  source 1..84: mol_type = other DNA
tttttttaagcagtggtatcaacgcagagtacnnttagaggcnncttctagcnntttttttttttttttttttttttttttttt

SEQ ID NO: 7185 - DNA, 84 bp, synthetic construct
  source 1..84: mol_type = other DNA
tttttttaagcagtggtatcaacgcagagtacnnttagaggcnngagtaacgnntttttttttttttttttttttttttttttt

SEQ ID NO: 7186 - DNA, 84 bp, synthetic construct
  source 1..84: mol_type = other DNA
tttttttaagcagtggtatcaacgcagagtacnnttagaggcnnctaagaggnntttttttttttttttttttttttttttttt

SEQ ID NO: 7187 - DNA, 84 bp, synthetic construct
  source 1..84: mol_type = other DNA
tttttttaagcagtggtatcaacgcagagtacnnttagaggcnnacgtgtagnntttttttttttttttttttttttttttttt

SEQ ID NO: 7188 - DNA, 84 bp, synthetic construct
  source 1..84: mol_type = other DNA
tttttttaagcagtggtatcaacgcagagtacnnttagaggcnnactacaggnntttttttttttttttttttttttttttttt

SEQ ID NO: 7189 - DNA, 84 bp, synthetic construct
  source 1..84: mol_type = other DNA
tttttttaagcagtggtatcaacgcagagtacnnttagaggcnntacaggtcnntttttttttttttttttttttttttttttt

SEQ ID NO: 7190 - DNA, 84 bp, synthetic construct
  source 1..84: mol_type = other DNA
tttttttaagcagtggtatcaacgcagagtacnnttagaggcnnctcacatgnntttttttttttttttttttttttttttttt

SEQ ID NO: 7191 - DNA, 84 bp, synthetic construct
  source 1..84: mol_type = other DNA
tttttttaagcagtggtatcaacgcagagtacnnttagaggcnnactaggagnntttttttttttttttttttttttttttttt

SEQ ID NO: 7192 - DNA, 84 bp, synthetic construct
  source 1..84: mol_type = other DNA
tttttttaagcagtggtatcaacgcagagtacnnttagaggcnnccatagganntttttttttttttttttttttttttttttt

SEQ ID NO: 7193 - DNA, 84 bp, synthetic construct
  source 1..84: mol_type = other DNA
tttttttaagcagtggtatcaacgcagagtacnnttagaggcnnggagaatcnntttttttttttttttttttttttttttttt

SEQ ID NO: 7194 - DNA, 84 bp, synthetic construct
  source 1..84: mol_type = other DNA
tttttttaagcagtggtatcaacgcagagtacnnttagaggcnngccaagaanntttttttttttttttttttttttttttttt

SEQ ID NO: 7195 - DNA, 84 bp, synthetic construct
  source 1..84: mol_type = other DNA
tttttttaagcagtggtatcaacgcagagtacnnttagaggcnnaaggcaagnntttttttttttttttttttttttttttttt

SEQ ID NO: 7196 - DNA, 84 bp, synthetic construct
  source 1..84: mol_type = other DNA
tttttttaagcagtggtatcaacgcagagtacnnttagaggcnnaatgtcgcnntttttttttttttttttttttttttttttt

SEQ ID NO: 7197 - DNA, 84 bp, synthetic construct
  source 1..84: mol_type = other DNA
tttttttaagcagtggtatcaacgcagagtacnnttagaggcnnatggaaccnntttttttttttttttttttttttttttttt

SEQ ID NO: 7198 - DNA, 84 bp, synthetic construct
  source 1..84: mol_type = other DNA
tttttttaagcagtggtatcaacgcagagtacnnttagaggcnnagaggcatnntttttttttttttttttttttttttttttt

SEQ ID NO: 7199 - DNA, 84 bp, synthetic construct
  source 1..84: mol_type = other DNA
tttttttaagcagtggtatcaacgcagagtacnnttagaggcnntgcatagcnntttttttttttttttttttttttttttttt

SEQ ID NO: 7200 - DNA, 84 bp, synthetic construct
  source 1..84: mol_type = other DNA
tttttttaagcagtggtatcaacgcagagtacnnttagaggcnnctaacgganntttttttttttttttttttttttttttttt

SEQ ID NO: 7201 - DNA, 84 bp, synthetic construct
  source 1..84: mol_type = other DNA
tttttttaagcagtggtatcaacgcagagtacnnttagaggcnntatcgaggnntttttttttttttttttttttttttttttt

SEQ ID NO: 7202 - DNA, 84 bp, synthetic construct
  source 1..84: mol_type = other DNA
tttttttaagcagtggtatcaacgcagagtacnnttagaggcnncatagcctnntttttttttttttttttttttttttttttt

SEQ ID NO: 7203 - DNA, 84 bp, synthetic construct
  source 1..84: mol_type = other DNA
tttttttaagcagtggtatcaacgcagagtacnnttagaggcnnatcgagacnntttttttttttttttttttttttttttttt

SEQ ID NO: 7204 - DNA, 84 bp, synthetic construct
  source 1..84: mol_type = other DNA
tttttttaagcagtggtatcaacgcagagtacnnttagaggcnnggaagagtnntttttttttttttttttttttttttttttt

SEQ ID NO: 7205 - DNA, 84 bp, synthetic construct
  source 1..84: mol_type = other DNA
tttttttaagcagtggtatcaacgcagagtacnnttagaggcnnccaagtagnntttttttttttttttttttttttttttttt

SEQ ID NO: 7206 - DNA, 84 bp, synthetic construct
  source 1..84: mol_type = other DNA
tttttttaagcagtggtatcaacgcagagtacnnttagaggcnnctgaacagnntttttttttttttttttttttttttttttt

SEQ ID NO: 7207 - DNA, 84 bp, synthetic construct
  source 1..84: mol_type = other DNA
tttttttaagcagtggtatcaacgcagagtacnnttagaggcnngtaggttcnntttttttttttttttttttttttttttttt

SEQ ID NO: 7208 - DNA, 84 bp, synthetic construct
  source 1..84: mol_type = other DNA
tttttttaagcagtggtatcaacgcagagtacnnttagaggcnngtatggacnntttttttttttttttttttttttttttttt

SEQ ID NO: 7209 - DNA, 84 bp, synthetic construct
  source 1..84: mol_type = other DNA
tttttttaagcagtggtatcaacgcagagtacnnttagaggcnntcgcaacanntttttttttttttttttttttttttttttt

SEQ ID NO: 7210 - DNA, 84 bp, synthetic construct
  source 1..84: mol_type = other DNA
tttttttaagcagtggtatcaacgcagagtacnnttagaggcnnccgctaatnntttttttttttttttttttttttttttttt

SEQ ID NO: 7211 - DNA, 84 bp, synthetic construct
  source 1..84: mol_type = other DNA
tttttttaagcagtggtatcaacgcagagtacnnttagaggcnngattcgcanntttttttttttttttttttttttttttttt

SEQ ID NO: 7212 - DNA, 84 bp, synthetic construct
  source 1..84: mol_type = other DNA
tttttttaagcagtggtatcaacgcagagtacnnttagaggcnncgatggaanntttttttttttttttttttttttttttttt

SEQ ID NO: 7213 - DNA, 84 bp, synthetic construct
  source 1..84: mol_type = other DNA
tttttttaagcagtggtatcaacgcagagtacnnttagaggcnnagcaagganntttttttttttttttttttttttttttttt

SEQ ID NO: 7214 - DNA, 84 bp, synthetic construct
  source 1..84: mol_type = other DNA
tttttttaagcagtggtatcaacgcagagtacnnttagaggcnncgtagcaanntttttttttttttttttttttttttttttt

SEQ ID NO: 7215 - DNA, 84 bp, synthetic construct
  source 1..84: mol_type = other DNA
tttttttaagcagtggtatcaacgcagagtacnnttagaggcnntggcagtanntttttttttttttttttttttttttttttt

SEQ ID NO: 7216 - DNA, 84 bp, synthetic construct
  source 1..84: mol_type = other DNA
tttttttaagcagtggtatcaacgcagagtacnnttagaggcnncggtagttnntttttttttttttttttttttttttttttt

SEQ ID NO: 7217 - DNA, 84 bp, synthetic construct
  source 1..84: mol_type = other DNA
tttttttaagcagtggtatcaacgcagagtacnnttagaggcnntgacttcgnntttttttttttttttttttttttttttttt

SEQ ID NO: 7218 - DNA, 84 bp, synthetic construct
  source 1..84: mol_type = other DNA
tttttttaagcagtggtatcaacgcagagtacnnttagaggcnngagtgcaanntttttttttttttttttttttttttttttt

SEQ ID NO: 7219 - DNA, 84 bp, synthetic construct
  source 1..84: mol_type = other DNA
tttttttaagcagtggtatcaacgcagagtacnnttagaggcnnacggtaacnntttttttttttttttttttttttttttttt

SEQ ID NO: 7220 - DNA, 84 bp, synthetic construct
  source 1..84: mol_type = other DNA
tttttttaagcagtggtatcaacgcagagtacnnttagaggcnnaagtggtgnntttttttttttttttttttttttttttttt

SEQ ID NO: 7221 - DNA, 84 bp, synthetic construct
  source 1..84: mol_type = other DNA
tttttttaagcagtggtatcaacgcagagtacnnttagaggcnnggagacaanntttttttttttttttttttttttttttttt

SEQ ID NO: 7222 - DNA, 84 bp, synthetic construct
  source 1..84: mol_type = other DNA
tttttttaagcagtggtatcaacgcagagtacnnttagaggcnntcaaggacnntttttttttttttttttttttttttttttt

SEQ ID NO: 7223 - DNA, 84 bp, synthetic construct
  source 1..84: mol_type = other DNA
tttttttaagcagtggtatcaacgcagagtacnnttagaggcnnaagagagcnntttttttttttttttttttttttttttttt

SEQ ID NO: 7224 - DNA, 84 bp, synthetic construct
  source 1..84: mol_type = other DNA
tttttttaagcagtggtatcaacgcagagtacnnttagaggcnncgagagatnntttttttttttttttttttttttttttttt

SEQ ID NO: 7225 - DNA, 84 bp, synthetic construct
  source 1..84: mol_type = other DNA
tttttttaagcagtggtatcaacgcagagtacnnttagaggcnnacagatggnntttttttttttttttttttttttttttttt

SEQ ID NO: 7226 - DNA, 84 bp, synthetic construct
  source 1..84: mol_type = other DNA
tttttttaagcagtggtatcaacgcagagtacnnttagaggcnnaggagtcanntttttttttttttttttttttttttttttt

SEQ ID NO: 7227 - DNA, 84 bp, synthetic construct
  source 1..84: mol_type = other DNA
tttttttaagcagtggtatcaacgcagagtacnnttagaggcnncgtgttacnntttttttttttttttttttttttttttttt

SEQ ID NO: 7228 - DNA, 84 bp, synthetic construct
  source 1..84: mol_type = other DNA
tttttttaagcagtggtatcaacgcagagtacnnttagaggcnntagtgtgcnntttttttttttttttttttttttttttttt

SEQ ID NO: 7229 - DNA, 84 bp, synthetic construct
  source 1..84: mol_type = other DNA
tttttttaagcagtggtatcaacgcagagtacnnttagaggcnnctcatgacnntttttttttttttttttttttttttttttt

SEQ ID NO: 7230 - DNA, 84 bp, synthetic construct
  source 1..84: mol_type = other DNA
tttttttaagcagtggtatcaacgcagagtacnnttagaggcnngtatccagnntttttttttttttttttttttttttttttt

SEQ ID NO: 7231 - DNA, 84 bp, synthetic construct
  source 1..84: mol_type = other DNA
tttttttaagcagtggtatcaacgcagagtacnnttagaggcnnacgcctatnntttttttttttttttttttttttttttttt

SEQ ID NO: 7232 - DNA, 84 bp, synthetic construct
  source 1..84: mol_type = other DNA
tttttttaagcagtggtatcaacgcagagtacnnttagaggcnnaacgacctnntttttttttttttttttttttttttttttt

SEQ ID NO: 7233 - DNA, 84 bp, synthetic construct
  source 1..84: mol_type = other DNA
tttttttaagcagtggtatcaacgcagagtacnnttagaggcnnatcaggctnntttttttttttttttttttttttttttttt

SEQ ID NO: 7234 - DNA, 84 bp, synthetic construct
  source 1..84: mol_type = other DNA
tttttttaagcagtggtatcaacgcagagtacnnttagaggcnncaagttcgnntttttttttttttttttttttttttttttt

SEQ ID NO: 7235 - DNA, 84 bp, synthetic construct
  source 1..84: mol_type = other DNA
tttttttaagcagtggtatcaacgcagagtacnnttagaggcnntagccaganntttttttttttttttttttttttttttttt

SEQ ID NO: 7236 - DNA, 84 bp, synthetic construct
  source 1..84: mol_type = other DNA
tttttttaagcagtggtatcaacgcagagtacnnttagaggcnncaatcacgnntttttttttttttttttttttttttttttt

SEQ ID NO: 7237 - DNA, 84 bp, synthetic construct
  source 1..84: mol_type = other DNA
tttttttaagcagtggtatcaacgcagagtacnnttagaggcnngcaacaagnntttttttttttttttttttttttttttttt

SEQ ID NO: 7238 - DNA, 84 bp, synthetic construct
  source 1..84: mol_type = other DNA
tttttttaagcagtggtatcaacgcagagtacnnttagaggcnncacgacaanntttttttttttttttttttttttttttttt

SEQ ID NO: 7239 - DNA, 84 bp, synthetic construct
  source 1..84: mol_type = other DNA
tttttttaagcagtggtatcaacgcagagtacnnttagaggcnntacggaganntttttttttttttttttttttttttttttt

SEQ ID NO: 7240 - DNA, 84 bp, synthetic construct
  source 1..84: mol_type = other DNA
tttttttaagcagtggtatcaacgcagagtacnnttagaggcnncgacaaganntttttttttttttttttttttttttttttt

SEQ ID NO: 7241 - DNA, 84 bp, synthetic construct
  source 1..84: mol_type = other DNA
tttttttaagcagtggtatcaacgcagagtacnnttagaggcnncgaagtganntttttttttttttttttttttttttttttt

SEQ ID NO: 7242 - DNA, 84 bp, synthetic construct
  source 1..84: mol_type = other DNA
tttttttaagcagtggtatcaacgcagagtacnnttagaggcnnagctggtanntttttttttttttttttttttttttttttt

SEQ ID NO: 7243 - DNA, 84 bp, synthetic construct
  source 1..84: mol_type = other DNA
tttttttaagcagtggtatcaacgcagagtacnnttagaggcnnaactaggcnntttttttttttttttttttttttttttttt

SEQ ID NO: 7244 - DNA, 84 bp, synthetic construct
  source 1..84: mol_type = other DNA
tttttttaagcagtggtatcaacgcagagtacnnttagaggcnncagcaagtnntttttttttttttttttttttttttttttt

SEQ ID NO: 7245 - DNA, 84 bp, synthetic construct
  source 1..84: mol_type = other DNA
tttttttaagcagtggtatcaacgcagagtacnnttagaggcnnacgaggtanntttttttttttttttttttttttttttttt

SEQ ID NO: 7246 - DNA, 84 bp, synthetic construct
  source 1..84: mol_type = other DNA
tttttttaagcagtggtatcaacgcagagtacnnttagaggcnncatcttccnntttttttttttttttttttttttttttttt

SEQ ID NO: 7247 - DNA, 84 bp, synthetic construct
  source 1..84: mol_type = other DNA
tttttttaagcagtggtatcaacgcagagtacnnttagaggcnncctgaatcnntttttttttttttttttttttttttttttt

SEQ ID NO: 7248 - DNA, 84 bp, synthetic construct
  source 1..84: mol_type = other DNA
tttttttaagcagtggtatcaacgcagagtacnnttagaggcnntgcagactnntttttttttttttttttttttttttttttt

SEQ ID NO: 7249 - DNA, 84 bp, synthetic construct
  source 1..84: mol_type = other DNA
tttttttaagcagtggtatcaacgcagagtacnnttagaggcnnagatgtggnntttttttttttttttttttttttttttttt

SEQ ID NO: 7250 - DNA, 84 bp, synthetic construct
  source 1..84: mol_type = other DNA
tttttttaagcagtggtatcaacgcagagtacnnttagaggcnnagttcgacnntttttttttttttttttttttttttttttt

SEQ ID NO: 7251 - DNA, 84 bp, synthetic construct
  source 1..84: mol_type = other DNA
tttttttaagcagtggtatcaacgcagagtacnnttagaggcnnacaacctcnntttttttttttttttttttttttttttttt

SEQ ID NO: 7252 - DNA, 84 bp, synthetic construct
  source 1..84: mol_type = other DNA
tttttttaagcagtggtatcaacgcagagtacnnttagaggcnncatggtagnntttttttttttttttttttttttttttttt

SEQ ID NO: 7253 - DNA, 84 bp, synthetic construct
  source 1..84: mol_type = other DNA
tttttttaagcagtggtatcaacgcagagtacnnttagaggcnncgtatctcnntttttttttttttttttttttttttttttt

SEQ ID NO: 7254 - DNA, 84 bp, synthetic construct
  source 1..84: mol_type = other DNA
tttttttaagcagtggtatcaacgcagagtacnnttagaggcnncctagttcnntttttttttttttttttttttttttttttt

SEQ ID NO: 7255 - DNA, 84 bp, synthetic construct
  source 1..84: mol_type = other DNA
tttttttaagcagtggtatcaacgcagagtacnnttagaggcnncaagagtcnntttttttttttttttttttttttttttttt

SEQ ID NO: 7256 - DNA, 84 bp, synthetic construct
  source 1..84: mol_type = other DNA
tttttttaagcagtggtatcaacgcagagtacnnccattgtgnnaatcggcanntttttttttttttttttttttttttttttt

SEQ ID NO: 7257 - DNA, 84 bp, synthetic construct
  source 1..84: mol_type = other DNA
tttttttaagcagtggtatcaacgcagagtacnnccattgtgnntacggcatnntttttttttttttttttttttttttttttt

SEQ ID NO: 7258 - DNA, 84 bp, synthetic construct
  source 1..84: mol_type = other DNA
tttttttaagcagtggtatcaacgcagagtacnnccattgtgnnttggatcgnntttttttttttttttttttttttttttttt

SEQ ID NO: 7259 - DNA, 84 bp, synthetic construct
  source 1..84: mol_type = other DNA
tttttttaagcagtggtatcaacgcagagtacnnccattgtgnntggaacganntttttttttttttttttttttttttttttt

SEQ ID NO: 7260 - DNA, 84 bp, synthetic construct
  source 1..84: mol_type = other DNA
tttttttaagcagtggtatcaacgcagagtacnnccattgtgnnggcaatcanntttttttttttttttttttttttttttttt

SEQ ID NO: 7261 - DNA, 84 bp, synthetic construct
  source 1..84: mol_type = other DNA
tttttttaagcagtggtatcaacgcagagtacnnccattgtgnngaatccganntttttttttttttttttttttttttttttt

SEQ ID NO: 7262 - DNA, 84 bp, synthetic construct
  source 1..84: mol_type = other DNA
tttttttaagcagtggtatcaacgcagagtacnnccattgtgnnttacggtgnntttttttttttttttttttttttttttttt

SEQ ID NO: 7263 - DNA, 84 bp, synthetic construct
  source 1..84: mol_type = other DNA
tttttttaagcagtggtatcaacgcagagtacnnccattgtgnncatatcggnntttttttttttttttttttttttttttttt

SEQ ID NO: 7264 - DNA, 84 bp, synthetic construct
  source 1..84: mol_type = other DNA
tttttttaagcagtggtatcaacgcagagtacnnccattgtgnncttcggtanntttttttttttttttttttttttttttttt

SEQ ID NO: 7265 - DNA, 84 bp, synthetic construct
  source 1..84: mol_type = other DNA
tttttttaagcagtggtatcaacgcagagtacnnccattgtgnntcctaacgnntttttttttttttttttttttttttttttt

SEQ ID NO: 7266 - DNA, 84 bp, synthetic construct
  source 1..84: mol_type = other DNA
tttttttaagcagtggtatcaacgcagagtacnnccattgtgnngtaagccanntttttttttttttttttttttttttttttt

SEQ ID NO: 7267 - DNA, 84 bp, synthetic construct
  source 1..84: mol_type = other DNA
tttttttaagcagtggtatcaacgcagagtacnnccattgtgnntaaggtggnntttttttttttttttttttttttttttttt

SEQ ID NO: 7268 - DNA, 84 bp, synthetic construct
  source 1..84: mol_type = other DNA
tttttttaagcagtggtatcaacgcagagtacnnccattgtgnnggtaagctnntttttttttttttttttttttttttttttt

SEQ ID NO: 7269 - DNA, 84 bp, synthetic construct
  source 1..84: mol_type = other DNA
tttttttaagcagtggtatcaacgcagagtacnnccattgtgnntgtgtcganntttttttttttttttttttttttttttttt

SEQ ID NO: 7270 - DNA, 84 bp, synthetic construct
  source 1..84: mol_type = other DNA
tttttttaagcagtggtatcaacgcagagtacnnccattgtgnngagcatganntttttttttttttttttttttttttttttt

SEQ ID NO: 7271 - DNA, 84 bp, synthetic construct
  source 1..84: mol_type = other DNA
tttttttaagcagtggtatcaacgcagagtacnnccattgtgnntcgaagtcnntttttttttttttttttttttttttttttt

SEQ ID NO: 7272 - DNA, 84 bp, synthetic construct
  source 1..84: mol_type = other DNA
tttttttaagcagtggtatcaacgcagagtacnnccattgtgnnggtgaacanntttttttttttttttttttttttttttttt

SEQ ID NO: 7273 - DNA, 84 bp, synthetic construct
  source 1..84: mol_type = other DNA
tttttttaagcagtggtatcaacgcagagtacnnccattgtgnnacatgcacnntttttttttttttttttttttttttttttt

SEQ ID NO: 7274 - DNA, 84 bp, synthetic construct
  source 1..84: mol_type = other DNA
tttttttaagcagtggtatcaacgcagagtacnnccattgtgnnccaacagtnntttttttttttttttttttttttttttttt

SEQ ID NO: 7275 - DNA, 84 bp, synthetic construct
  source 1..84: mol_type = other DNA
tttttttaagcagtggtatcaacgcagagtacnnccattgtgnnagaacagcnntttttttttttttttttttttttttttttt

SEQ ID NO: 7276 - DNA, 84 bp, synthetic construct
  source 1..84: mol_type = other DNA
tttttttaagcagtggtatcaacgcagagtacnnccattgtgnngaacacgtnntttttttttttttttttttttttttttttt

SEQ ID NO: 7277 - DNA, 84 bp, synthetic construct
  source 1..84: mol_type = other DNA
tttttttaagcagtggtatcaacgcagagtacnnccattgtgnnggtcttcanntttttttttttttttttttttttttttttt

SEQ ID NO: 7278 - DNA, 84 bp, synthetic construct
  source 1..84: mol_type = other DNA
tttttttaagcagtggtatcaacgcagagtacnnccattgtgnnaggttcagnntttttttttttttttttttttttttttttt

SEQ ID NO: 7279 - DNA, 84 bp, synthetic construct
  source 1..84: mol_type = other DNA
tttttttaagcagtggtatcaacgcagagtacnnccattgtgnnctagagcanntttttttttttttttttttttttttttttt

SEQ ID NO: 7280 - DNA, 84 bp, synthetic construct
  source 1..84: mol_type = other DNA
tttttttaagcagtggtatcaacgcagagtacnnccattgtgnncttctagcnntttttttttttttttttttttttttttttt

SEQ ID NO: 7281 - DNA, 84 bp, synthetic construct
  source 1..84: mol_type = other DNA
tttttttaagcagtggtatcaacgcagagtacnnccattgtgnngagtaacgnntttttttttttttttttttttttttttttt

SEQ ID NO: 7282 - DNA, 84 bp, synthetic construct
  source 1..84: mol_type = other DNA
tttttttaagcagtggtatcaacgcagagtacnnccattgtgnnctaagaggnntttttttttttttttttttttttttttttt

SEQ ID NO: 7283 - DNA, 84 bp, synthetic construct
  source 1..84: mol_type = other DNA
tttttttaagcagtggtatcaacgcagagtacnnccattgtgnnacgtgtagnntttttttttttttttttttttttttttttt

SEQ ID NO: 7284 - DNA, 84 bp, synthetic construct
  source 1..84: mol_type = other DNA
tttttttaagcagtggtatcaacgcagagtacnnccattgtgnnactacaggnntttttttttttttttttttttttttttttt

SEQ ID NO: 7285 - DNA, 84 bp, synthetic construct
  source 1..84: mol_type = other DNA
tttttttaagcagtggtatcaacgcagagtacnnccattgtgnntacaggtcnntttttttttttttttttttttttttttttt

SEQ ID NO: 7286 - DNA, 84 bp, synthetic construct
  source 1..84: mol_type = other DNA
tttttttaagcagtggtatcaacgcagagtacnnccattgtgnnctcacatgnntttttttttttttttttttttttttttttt

SEQ ID NO: 7287 - DNA, 84 bp, synthetic construct
  source 1..84: mol_type = other DNA
tttttttaagcagtggtatcaacgcagagtacnnccattgtgnnactaggagnntttttttttttttttttttttttttttttt

SEQ ID NO: 7288 - DNA, 84 bp, synthetic construct
  source 1..84: mol_type = other DNA
tttttttaagcagtggtatcaacgcagagtacnnccattgtgnnccatagganntttttttttttttttttttttttttttttt

SEQ ID NO: 7289 - DNA, 84 bp, synthetic construct
  source 1..84: mol_type = other DNA
tttttttaagcagtggtatcaacgcagagtacnnccattgtgnnggagaatcnntttttttttttttttttttttttttttttt

SEQ ID NO: 7290 - DNA, 84 bp, synthetic construct
  source 1..84: mol_type = other DNA
tttttttaagcagtggtatcaacgcagagtacnnccattgtgnngccaagaanntttttttttttttttttttttttttttttt

SEQ ID NO: 7291 - DNA, 84 bp, synthetic construct
  source 1..84: mol_type = other DNA
tttttttaagcagtggtatcaacgcagagtacnnccattgtgnnaaggcaagnntttttttttttttttttttttttttttttt

SEQ ID NO: 7292 - DNA, 84 bp, synthetic construct
  source 1..84: mol_type = other DNA
tttttttaagcagtggtatcaacgcagagtacnnccattgtgnnaatgtcgcnntttttttttttttttttttttttttttttt

SEQ ID NO: 7293 - DNA, 84 bp, synthetic construct
  source 1..84: mol_type = other DNA
tttttttaagcagtggtatcaacgcagagtacnnccattgtgnnatggaaccnntttttttttttttttttttttttttttttt

SEQ ID NO: 7294 - DNA, 84 bp, synthetic construct
  source 1..84: mol_type = other DNA
tttttttaagcagtggtatcaacgcagagtacnnccattgtgnnagaggcatnntttttttttttttttttttttttttttttt

SEQ ID NO: 7295 - DNA, 84 bp, synthetic construct
  source 1..84: mol_type = other DNA
tttttttaagcagtggtatcaacgcagagtacnnccattgtgnntgcatagcnntttttttttttttttttttttttttttttt

SEQ ID NO: 7296 - DNA, 84 bp, synthetic construct
  source 1..84: mol_type = other DNA
tttttttaagcagtggtatcaacgcagagtacnnccattgtgnnctaacgganntttttttttttttttttttttttttttttt

SEQ ID NO: 7297 - DNA, 84 bp, synthetic construct
  source 1..84: mol_type = other DNA
tttttttaagcagtggtatcaacgcagagtacnnccattgtgnntatcgaggnntttttttttttttttttttttttttttttt

SEQ ID NO: 7298 - DNA, 84 bp, synthetic construct
  source 1..84: mol_type = other DNA
tttttttaagcagtggtatcaacgcagagtacnnccattgtgnncatagcctnntttttttttttttttttttttttttttttt

SEQ ID NO: 7299 - DNA, 84 bp, synthetic construct
  source 1..84: mol_type = other DNA
tttttttaagcagtggtatcaacgcagagtacnnccattgtgnnatcgagacnntttttttttttttttttttttttttttttt

SEQ ID NO: 7300 - DNA, 84 bp, synthetic construct
  source 1..84: mol_type = other DNA
tttttttaagcagtggtatcaacgcagagtacnnccattgtgnnggaagagtnntttttttttttttttttttttttttttttt

SEQ ID NO: 7301 - DNA, 84 bp, synthetic construct
  source 1..84: mol_type = other DNA
tttttttaagcagtggtatcaacgcagagtacnnccattgtgnnccaagtagnntttttttttttttttttttttttttttttt

SEQ ID NO: 7302 - DNA, 84 bp, synthetic construct
  source 1..84: mol_type = other DNA
tttttttaagcagtggtatcaacgcagagtacnnccattgtgnnctgaacagnntttttttttttttttttttttttttttttt

SEQ ID NO: 7303 - DNA, 84 bp, synthetic construct
  source 1..84: mol_type = other DNA
tttttttaagcagtggtatcaacgcagagtacnnccattgtgnngtaggttcnntttttttttttttttttttttttttttttt

SEQ ID NO: 7304 - DNA, 84 bp, synthetic construct
  source 1..84: mol_type = other DNA
tttttttaagcagtggtatcaacgcagagtacnnccattgtgnngtatggacnntttttttttttttttttttttttttttttt

SEQ ID NO: 7305 - DNA, 84 bp, synthetic construct
  source 1..84: mol_type = other DNA
tttttttaagcagtggtatcaacgcagagtacnnccattgtgnntcgcaacanntttttttttttttttttttttttttttttt

SEQ ID NO: 7306 - DNA, 84 bp, synthetic construct
  source 1..84: mol_type = other DNA
tttttttaagcagtggtatcaacgcagagtacnnccattgtgnnccgctaatnntttttttttttttttttttttttttttttt

SEQ ID NO: 7307 - DNA, 84 bp, synthetic construct
  source 1..84: mol_type = other DNA
tttttttaagcagtggtatcaacgcagagtacnnccattgtgnngattcgcanntttttttttttttttttttttttttttttt

SEQ ID NO: 7308 - DNA, 84 bp, synthetic construct
  source 1..84: mol_type = other DNA
tttttttaagcagtggtatcaacgcagagtacnnccattgtgnncgatggaanntttttttttttttttttttttttttttttt

SEQ ID NO: 7309 - DNA, 84 bp, synthetic construct
  source 1..84: mol_type = other DNA
tttttttaagcagtggtatcaacgcagagtacnnccattgtgnnagcaagganntttttttttttttttttttttttttttttt

SEQ ID NO: 7310 - DNA, 84 bp, synthetic construct
  source 1..84: mol_type = other DNA
tttttttaagcagtggtatcaacgcagagtacnnccattgtgnncgtagcaanntttttttttttttttttttttttttttttt

SEQ ID NO: 7311 - DNA, 84 bp, synthetic construct
  source 1..84: mol_type = other DNA
tttttttaagcagtggtatcaacgcagagtacnnccattgtgnntggcagtanntttttttttttttttttttttttttttttt

SEQ ID NO: 7312 - DNA, 84 bp, synthetic construct
  source 1..84: mol_type = other DNA
tttttttaagcagtggtatcaacgcagagtacnnccattgtgnncggtagttnntttttttttttttttttttttttttttttt

SEQ ID NO: 7313 - DNA, 84 bp, synthetic construct
  source 1..84: mol_type = other DNA
tttttttaagcagtggtatcaacgcagagtacnnccattgtgnntgacttcgnntttttttttttttttttttttttttttttt

SEQ ID NO: 7314 - DNA, 84 bp, synthetic construct
  source 1..84: mol_type = other DNA
tttttttaagcagtggtatcaacgcagagtacnnccattgtgnngagtgcaanntttttttttttttttttttttttttttttt

SEQ ID NO: 7315 - DNA, 84 bp, synthetic construct
  source 1..84: mol_type = other DNA
tttttttaagcagtggtatcaacgcagagtacnnccattgtgnnacggtaacnntttttttttttttttttttttttttttttt

SEQ ID NO: 7316 - DNA, 84 bp, synthetic construct
  source 1..84: mol_type = other DNA
tttttttaagcagtggtatcaacgcagagtacnnccattgtgnnaagtggtgnntttttttttttttttttttttttttttttt

SEQ ID NO: 7317 - DNA, 84 bp, synthetic construct
  source 1..84: mol_type = other DNA
tttttttaagcagtggtatcaacgcagagtacnnccattgtgnnggagacaanntttttttttttttttttttttttttttttt

SEQ ID NO: 7318 - DNA, 84 bp, synthetic construct
  source 1..84: mol_type = other DNA
tttttttaagcagtggtatcaacgcagagtacnnccattgtgnntcaaggacnntttttttttttttttttttttttttttttt

SEQ ID NO: 7319 - DNA, 84 bp, synthetic construct
  source 1..84: mol_type = other DNA
tttttttaagcagtggtatcaacgcagagtacnnccattgtgnnaagagagcnntttttttttttttttttttttttttttttt

SEQ ID NO: 7320 - DNA, 84 bp, synthetic construct
  source 1..84: mol_type = other DNA
tttttttaagcagtggtatcaacgcagagtacnnccattgtgnncgagagatnntttttttttttttttttttttttttttttt

SEQ ID NO: 7321 - DNA, 84 bp, synthetic construct
  source 1..84: mol_type = other DNA
tttttttaagcagtggtatcaacgcagagtacnnccattgtgnnacagatggnntttttttttttttttttttttttttttttt

SEQ ID NO: 7322 - DNA, 84 bp, synthetic construct
  source 1..84: mol_type = other DNA
tttttttaagcagtggtatcaacgcagagtacnnccattgtgnnaggagtcanntttttttttttttttttttttttttttttt

SEQ ID NO: 7323 - DNA, 84 bp, synthetic construct
  source 1..84: mol_type = other DNA
tttttttaagcagtggtatcaacgcagagtacnnccattgtgnncgtgttacnntttttttttttttttttttttttttttttt

SEQ ID NO: 7324 - DNA, 84 bp, synthetic construct
  source 1..84: mol_type = other DNA
tttttttaagcagtggtatcaacgcagagtacnnccattgtgnntagtgtgcnntttttttttttttttttttttttttttttt

SEQ ID NO: 7325 - DNA, 84 bp, synthetic construct
  source 1..84: mol_type = other DNA
tttttttaagcagtggtatcaacgcagagtacnnccattgtgnnctcatgacnntttttttttttttttttttttttttttttt

SEQ ID NO: 7326 - DNA, 84 bp, synthetic construct
  source 1..84: mol_type = other DNA
tttttttaagcagtggtatcaacgcagagtacnnccattgtgnngtatccagnntttttttttttttttttttttttttttttt

SEQ ID NO: 7327 - DNA, 84 bp, synthetic construct
  source 1..84: mol_type = other DNA
tttttttaagcagtggtatcaacgcagagtacnnccattgtgnnacgcctatnntttttttttttttttttttttttttttttt

SEQ ID NO: 7328 - DNA, 84 bp, synthetic construct
  source 1..84: mol_type = other DNA
tttttttaagcagtggtatcaacgcagagtacnnccattgtgnnaacgacctnntttttttttttttttttttttttttttttt

SEQ ID NO: 7329 - DNA, 84 bp, synthetic construct
  source 1..84: mol_type = other DNA
tttttttaagcagtggtatcaacgcagagtacnnccattgtgnnatcaggctnntttttttttttttttttttttttttttttt

SEQ ID NO: 7330 - DNA, 84 bp, synthetic construct
  source 1..84: mol_type = other DNA
tttttttaagcagtggtatcaacgcagagtacnnccattgtgnncaagttcgnntttttttttttttttttttttttttttttt

SEQ ID NO: 7331 - DNA, 84 bp, synthetic construct
  source 1..84: mol_type = other DNA
tttttttaagcagtggtatcaacgcagagtacnnccattgtgnntagccaganntttttttttttttttttttttttttttttt

SEQ ID NO: 7332 - DNA, 84 bp, synthetic construct
  source 1..84: mol_type = other DNA
tttttttaagcagtggtatcaacgcagagtacnnccattgtgnncaatcacgnntttttttttttttttttttttttttttttt

SEQ ID NO: 7333 - DNA, 84 bp, synthetic construct
  source 1..84: mol_type = other DNA
tttttttaagcagtggtatcaacgcagagtacnnccattgtgnngcaacaagnntttttttttttttttttttttttttttttt

SEQ ID NO: 7334 - DNA, 84 bp, synthetic construct
  source 1..84: mol_type = other DNA
tttttttaagcagtggtatcaacgcagagtacnnccattgtgnncacgacaanntttttttttttttttttttttttttttttt

SEQ ID NO: 7335 - DNA, 84 bp, synthetic construct
  source 1..84: mol_type = other DNA
tttttttaagcagtggtatcaacgcagagtacnnccattgtgnntacggaganntttttttttttttttttttttttttttttt

SEQ ID NO: 7336 - DNA, 84 bp, synthetic construct
  source 1..84: mol_type = other DNA
tttttttaagcagtggtatcaacgcagagtacnnccattgtgnncgacaaganntttttttttttttttttttttttttttttt

SEQ ID NO: 7337 - DNA, 84 bp, synthetic construct
  source 1..84: mol_type = other DNA
tttttttaagcagtggtatcaacgcagagtacnnccattgtgnncgaagtganntttttttttttttttttttttttttttttt

SEQ ID NO: 7338 - DNA, 84 bp, synthetic construct
  source 1..84: mol_type = other DNA
tttttttaagcagtggtatcaacgcagagtacnnccattgtgnnagctggtanntttttttttttttttttttttttttttttt

SEQ ID NO: 7339 - DNA, 84 bp, synthetic construct
  source 1..84: mol_type = other DNA
tttttttaagcagtggtatcaacgcagagtacnnccattgtgnnaactaggcnntttttttttttttttttttttttttttttt

SEQ ID NO: 7340 - DNA, 84 bp, synthetic construct
  source 1..84: mol_type = other DNA
tttttttaagcagtggtatcaacgcagagtacnnccattgtgnncagcaagtnntttttttttttttttttttttttttttttt

SEQ ID NO: 7341 - DNA, 84 bp, synthetic construct
  source 1..84: mol_type = other DNA
tttttttaagcagtggtatcaacgcagagtacnnccattgtgnnacgaggtanntttttttttttttttttttttttttttttt

SEQ ID NO: 7342 - DNA, 84 bp, synthetic construct
  source 1..84: mol_type = other DNA
tttttttaagcagtggtatcaacgcagagtacnnccattgtgnncatcttccnntttttttttttttttttttttttttttttt

SEQ ID NO: 7343 - DNA, 84 bp, synthetic construct
  source 1..84: mol_type = other DNA
tttttttaagcagtggtatcaacgcagagtacnnccattgtgnncctgaatcnntttttttttttttttttttttttttttttt

SEQ ID NO: 7344 - DNA, 84 bp, synthetic construct
  source 1..84: mol_type = other DNA
tttttttaagcagtggtatcaacgcagagtacnnccattgtgnntgcagactnntttttttttttttttttttttttttttttt

SEQ ID NO: 7345 - DNA, 84 bp, synthetic construct
  source 1..84: mol_type = other DNA
tttttttaagcagtggtatcaacgcagagtacnnccattgtgnnagatgtggnntttttttttttttttttttttttttttttt

SEQ ID NO: 7346 - DNA, 84 bp, synthetic construct
  source 1..84: mol_type = other DNA
tttttttaagcagtggtatcaacgcagagtacnnccattgtgnnagttcgacnntttttttttttttttttttttttttttttt

SEQ ID NO: 7347 - DNA, 84 bp, synthetic construct
  source 1..84: mol_type = other DNA
tttttttaagcagtggtatcaacgcagagtacnnccattgtgnnacaacctcnntttttttttttttttttttttttttttttt

SEQ ID NO: 7348 - DNA, 84 bp, synthetic construct
  source 1..84: mol_type = other DNA
tttttttaagcagtggtatcaacgcagagtacnnccattgtgnncatggtagnntttttttttttttttttttttttttttttt

SEQ ID NO: 7349 - DNA, 84 bp, synthetic construct
  source 1..84: mol_type = other DNA
tttttttaagcagtggtatcaacgcagagtacnnccattgtgnncgtatctcnntttttttttttttttttttttttttttttt

SEQ ID NO: 7350 - DNA, 84 bp, synthetic construct
  source 1..84: mol_type = other DNA
tttttttaagcagtggtatcaacgcagagtacnnccattgtgnncctagttcnntttttttttttttttttttttttttttttt

SEQ ID NO: 7351 - DNA, 84 bp, synthetic construct
  source 1..84: mol_type = other DNA
tttttttaagcagtggtatcaacgcagagtacnnccattgtgnncaagagtcnntttttttttttttttttttttttttttttt

SEQ ID NO: 7352 - DNA, 84 bp, synthetic construct
  source 1..84: mol_type = other DNA
tttttttaagcagtggtatcaacgcagagtacnncgagattgnnaatcggcanntttttttttttttttttttttttttttttt

SEQ ID NO: 7353 - DNA, 84 bp, synthetic construct
  source 1..84: mol_type = other DNA
tttttttaagcagtggtatcaacgcagagtacnncgagattgnntacggcatnntttttttttttttttttttttttttttttt

SEQ ID NO: 7354 - DNA, 84 bp, synthetic construct
  source 1..84: mol_type = other DNA
tttttttaagcagtggtatcaacgcagagtacnncgagattgnnttggatcgnntttttttttttttttttttttttttttttt

SEQ ID NO: 7355 - DNA, 84 bp, synthetic construct
  source 1..84: mol_type = other DNA
tttttttaagcagtggtatcaacgcagagtacnncgagattgnntggaacganntttttttttttttttttttttttttttttt

SEQ ID NO: 7356 - DNA, 84 bp, synthetic construct
  source 1..84: mol_type = other DNA
tttttttaagcagtggtatcaacgcagagtacnncgagattgnnggcaatcanntttttttttttttttttttttttttttttt

SEQ ID NO: 7357 - DNA, 84 bp, synthetic construct
  source 1..84: mol_type = other DNA
tttttttaagcagtggtatcaacgcagagtacnncgagattgnngaatccganntttttttttttttttttttttttttttttt

SEQ ID NO: 7358 - DNA, 84 bp, synthetic construct
  source 1..84: mol_type = other DNA
tttttttaagcagtggtatcaacgcagagtacnncgagattgnnttacggtgnntttttttttttttttttttttttttttttt

SEQ ID NO: 7359 - DNA, 84 bp, synthetic construct
  source 1..84: mol_type = other DNA
tttttttaagcagtggtatcaacgcagagtacnncgagattgnncatatcggnntttttttttttttttttttttttttttttt

SEQ ID NO: 7360 - DNA, 84 bp, synthetic construct
  source 1..84: mol_type = other DNA
tttttttaagcagtggtatcaacgcagagtacnncgagattgnncttcggtanntttttttttttttttttttttttttttttt

SEQ ID NO: 7361 - DNA, 84 bp, synthetic construct
  source 1..84: mol_type = other DNA
tttttttaagcagtggtatcaacgcagagtacnncgagattgnntcctaacgnntttttttttttttttttttttttttttttt

SEQ ID NO: 7362 - DNA, 84 bp, synthetic construct
  source 1..84: mol_type = other DNA
tttttttaagcagtggtatcaacgcagagtacnncgagattgnngtaagccanntttttttttttttttttttttttttttttt

SEQ ID NO: 7363 - DNA, 84 bp, synthetic construct
  source 1..84: mol_type = other DNA
tttttttaagcagtggtatcaacgcagagtacnncgagattgnntaaggtggnntttttttttttttttttttttttttttttt

SEQ ID NO: 7364 - DNA, 84 bp, synthetic construct
  source 1..84: mol_type = other DNA
tttttttaagcagtggtatcaacgcagagtacnncgagattgnnggtaagctnntttttttttttttttttttttttttttttt

SEQ ID NO: 7365 - DNA, 84 bp, synthetic construct
  source 1..84: mol_type = other DNA
tttttttaagcagtggtatcaacgcagagtacnncgagattgnntgtgtcganntttttttttttttttttttttttttttttt

SEQ ID NO: 7366 - DNA, 84 bp, synthetic construct
  source 1..84: mol_type = other DNA
tttttttaagcagtggtatcaacgcagagtacnncgagattgnngagcatganntttttttttttttttttttttttttttttt

SEQ ID NO: 7367 - DNA, 84 bp, synthetic construct
  source 1..84: mol_type = other DNA
tttttttaagcagtggtatcaacgcagagtacnncgagattgnntcgaagtcnntttttttttttttttttttttttttttttt

SEQ ID NO: 7368 - DNA, 84 bp, synthetic construct
  source 1..84: mol_type = other DNA
tttttttaagcagtggtatcaacgcagagtacnncgagattgnnggtgaacanntttttttttttttttttttttttttttttt

SEQ ID NO: 7369 - DNA, 84 bp, synthetic construct
  source 1..84: mol_type = other DNA
tttttttaagcagtggtatcaacgcagagtacnncgagattgnnacatgcacnntttttttttttttttttttttttttttttt

SEQ ID NO: 7370 - DNA, 84 bp, synthetic construct
  source 1..84: mol_type = other DNA
tttttttaagcagtggtatcaacgcagagtacnncgagattgnnccaacagtnntttttttttttttttttttttttttttttt

SEQ ID NO: 7371 - DNA, 84 bp, synthetic construct
  source 1..84: mol_type = other DNA
tttttttaagcagtggtatcaacgcagagtacnncgagattgnnagaacagcnntttttttttttttttttttttttttttttt

SEQ ID NO: 7372 - DNA, 84 bp, synthetic construct
  source 1..84: mol_type = other DNA
tttttttaagcagtggtatcaacgcagagtacnncgagattgnngaacacgtnntttttttttttttttttttttttttttttt

SEQ ID NO: 7373 - DNA, 84 bp, synthetic construct
  source 1..84: mol_type = other DNA
tttttttaagcagtggtatcaacgcagagtacnncgagattgnnggtcttcanntttttttttttttttttttttttttttttt

SEQ ID NO: 7374 - DNA, 84 bp, synthetic construct
  source 1..84: mol_type = other DNA
tttttttaagcagtggtatcaacgcagagtacnncgagattgnnaggttcagnntttttttttttttttttttttttttttttt

SEQ ID NO: 7375 - DNA, 84 bp, synthetic construct
  source 1..84: mol_type = other DNA
tttttttaagcagtggtatcaacgcagagtacnncgagattgnnctagagcanntttttttttttttttttttttttttttttt

SEQ ID NO: 7376 - DNA, 84 bp, synthetic construct
  source 1..84: mol_type = other DNA
tttttttaagcagtggtatcaacgcagagtacnncgagattgnncttctagcnntttttttttttttttttttttttttttttt

SEQ ID NO: 7377 - DNA, 84 bp, synthetic construct
  source 1..84: mol_type = other DNA
tttttttaagcagtggtatcaacgcagagtacnncgagattgnngagtaacgnntttttttttttttttttttttttttttttt

SEQ ID NO: 7378 - DNA, 84 bp, synthetic construct
  source 1..84: mol_type = other DNA
tttttttaagcagtggtatcaacgcagagtacnncgagattgnnctaagaggnntttttttttttttttttttttttttttttt

SEQ ID NO: 7379 - DNA, 84 bp, synthetic construct
  source 1..84: mol_type = other DNA
tttttttaagcagtggtatcaacgcagagtacnncgagattgnnacgtgtagnntttttttttttttttttttttttttttttt

SEQ ID NO: 7380 - DNA, 84 bp, synthetic construct
  source 1..84: mol_type = other DNA
tttttttaagcagtggtatcaacgcagagtacnncgagattgnnactacaggnntttttttttttttttttttttttttttttt

SEQ ID NO: 7381 - DNA, 84 bp, synthetic construct
  source 1..84: mol_type = other DNA
tttttttaagcagtggtatcaacgcagagtacnncgagattgnntacaggtcnntttttttttttttttttttttttttttttt

SEQ ID NO: 7382 - DNA, 84 bp, synthetic construct
  source 1..84: mol_type = other DNA
tttttttaagcagtggtatcaacgcagagtacnncgagattgnnctcacatgnntttttttttttttttttttttttttttttt

SEQ ID NO: 7383 - DNA, 84 bp, synthetic construct
  source 1..84: mol_type = other DNA
tttttttaagcagtggtatcaacgcagagtacnncgagattgnnactaggagnntttttttttttttttttttttttttttttt

SEQ ID NO: 7384 - DNA, 84 bp, synthetic construct
  source 1..84: mol_type = other DNA
tttttttaagcagtggtatcaacgcagagtacnncgagattgnnccatagganntttttttttttttttttttttttttttttt

SEQ ID NO: 7385 - DNA, 84 bp, synthetic construct
  source 1..84: mol_type = other DNA
tttttttaagcagtggtatcaacgcagagtacnncgagattgnnggagaatcnntttttttttttttttttttttttttttttt

SEQ ID NO: 7386 - DNA, 84 bp, synthetic construct
  source 1..84: mol_type = other DNA
tttttttaagcagtggtatcaacgcagagtacnncgagattgnngccaagaanntttttttttttttttttttttttttttttt

SEQ ID NO: 7387 - DNA, 84 bp, synthetic construct
  source 1..84: mol_type = other DNA
tttttttaagcagtggtatcaacgcagagtacnncgagattgnnaaggcaagnntttttttttttttttttttttttttttttt

SEQ ID NO: 7388 - DNA, 84 bp, synthetic construct
  source 1..84: mol_type = other DNA
tttttttaagcagtggtatcaacgcagagtacnncgagattgnnaatgtcgcnntttttttttttttttttttttttttttttt

SEQ ID NO: 7389 - DNA, 84 bp, synthetic construct
  source 1..84: mol_type = other DNA
tttttttaagcagtggtatcaacgcagagtacnncgagattgnnatggaaccnntttttttttttttttttttttttttttttt

SEQ ID NO: 7390 - DNA, 84 bp, synthetic construct
  source 1..84: mol_type = other DNA
tttttttaagcagtggtatcaacgcagagtacnncgagattgnnagaggcatnntttttttttttttttttttttttttttttt

SEQ ID NO: 7391 - DNA, 84 bp, synthetic construct
  source 1..84: mol_type = other DNA
tttttttaagcagtggtatcaacgcagagtacnncgagattgnntgcatagcnntttttttttttttttttttttttttttttt

SEQ ID NO: 7392 - DNA, 84 bp, synthetic construct
  source 1..84: mol_type = other DNA
tttttttaagcagtggtatcaacgcagagtacnncgagattgnnctaacgganntttttttttttttttttttttttttttttt

SEQ ID NO: 7393 - DNA, 84 bp, synthetic construct
  source 1..84: mol_type = other DNA
tttttttaagcagtggtatcaacgcagagtacnncgagattgnntatcgaggnntttttttttttttttttttttttttttttt

SEQ ID NO: 7394 - DNA, 84 bp, synthetic construct
  source 1..84: mol_type = other DNA
tttttttaagcagtggtatcaacgcagagtacnncgagattgnncatagcctnntttttttttttttttttttttttttttttt

SEQ ID NO: 7395 - DNA, 84 bp, synthetic construct
  source 1..84: mol_type = other DNA
tttttttaagcagtggtatcaacgcagagtacnncgagattgnnatcgagacnntttttttttttttttttttttttttttttt

SEQ ID NO: 7396 - DNA, 84 bp, synthetic construct
  source 1..84: mol_type = other DNA
tttttttaagcagtggtatcaacgcagagtacnncgagattgnnggaagagtnntttttttttttttttttttttttttttttt

SEQ ID NO: 7397 - DNA, 84 bp, synthetic construct
  source 1..84: mol_type = other DNA
tttttttaagcagtggtatcaacgcagagtacnncgagattgnnccaagtagnntttttttttttttttttttttttttttttt

SEQ ID NO: 7398 - DNA, 84 bp, synthetic construct
  source 1..84: mol_type = other DNA
tttttttaagcagtggtatcaacgcagagtacnncgagattgnnctgaacagnntttttttttttttttttttttttttttttt

SEQ ID NO: 7399 - DNA, 84 bp, synthetic construct
  source 1..84: mol_type = other DNA
tttttttaagcagtggtatcaacgcagagtacnncgagattgnngtaggttcnntttttttttttttttttttttttttttttt

SEQ ID NO: 7400 - DNA, 84 bp, synthetic construct
  source 1..84: mol_type = other DNA
tttttttaagcagtggtatcaacgcagagtacnncgagattgnngtatggacnntttttttttttttttttttttttttttttt

SEQ ID NO: 7401 - DNA, 84 bp, synthetic construct
  source 1..84: mol_type = other DNA
tttttttaagcagtggtatcaacgcagagtacnncgagattgnntcgcaacanntttttttttttttttttttttttttttttt

SEQ ID NO: 7402 - DNA, 84 bp, synthetic construct
  source 1..84: mol_type = other DNA
tttttttaagcagtggtatcaacgcagagtacnncgagattgnnccgctaatnntttttttttttttttttttttttttttttt

SEQ ID NO: 7403 - DNA, 84 bp, synthetic construct
  source 1..84: mol_type = other DNA
tttttttaagcagtggtatcaacgcagagtacnncgagattgnngattcgcanntttttttttttttttttttttttttttttt

SEQ ID NO: 7404 - DNA, 84 bp, synthetic construct
  source 1..84: mol_type = other DNA
tttttttaagcagtggtatcaacgcagagtacnncgagattgnncgatggaanntttttttttttttttttttttttttttttt

SEQ ID NO: 7405 - DNA, 84 bp, synthetic construct
  source 1..84: mol_type = other DNA
tttttttaagcagtggtatcaacgcagagtacnncgagattgnnagcaagganntttttttttttttttttttttttttttttt

SEQ ID NO: 7406 - DNA, 84 bp, synthetic construct
  source 1..84: mol_type = other DNA
tttttttaagcagtggtatcaacgcagagtacnncgagattgnncgtagcaanntttttttttttttttttttttttttttttt

SEQ ID NO: 7407 - DNA, 84 bp, synthetic construct
  source 1..84: mol_type = other DNA
tttttttaagcagtggtatcaacgcagagtacnncgagattgnntggcagtanntttttttttttttttttttttttttttttt

SEQ ID NO: 7408 - DNA, 84 bp, synthetic construct
  source 1..84: mol_type = other DNA
tttttttaagcagtggtatcaacgcagagtacnncgagattgnncggtagttnntttttttttttttttttttttttttttttt

SEQ ID NO: 7409 - DNA, 84 bp, synthetic construct
  source 1..84: mol_type = other DNA
tttttttaagcagtggtatcaacgcagagtacnncgagattgnntgacttcgnntttttttttttttttttttttttttttttt

SEQ ID NO: 7410 - DNA, 84 bp, synthetic construct
  source 1..84: mol_type = other DNA
tttttttaagcagtggtatcaacgcagagtacnncgagattgnngagtgcaanntttttttttttttttttttttttttttttt

SEQ ID NO: 7411 - DNA, 84 bp, synthetic construct
  source 1..84: mol_type = other DNA
tttttttaagcagtggtatcaacgcagagtacnncgagattgnnacggtaacnntttttttttttttttttttttttttttttt

SEQ ID NO: 7412 - DNA, 84 bp, synthetic construct
  source 1..84: mol_type = other DNA
tttttttaagcagtggtatcaacgcagagtacnncgagattgnnaagtggtgnntttttttttttttttttttttttttttttt

SEQ ID NO: 7413 - DNA, 84 bp, synthetic construct
  source 1..84: mol_type = other DNA
tttttttaagcagtggtatcaacgcagagtacnncgagattgnnggagacaanntttttttttttttttttttttttttttttt

SEQ ID NO: 7414 - DNA, 84 bp, synthetic construct
  source 1..84: mol_type = other DNA
tttttttaagcagtggtatcaacgcagagtacnncgagattgnntcaaggacnntttttttttttttttttttttttttttttt

SEQ ID NO: 7415 - DNA, 84 bp, synthetic construct
  source 1..84: mol_type = other DNA
tttttttaagcagtggtatcaacgcagagtacnncgagattgnnaagagagcnntttttttttttttttttttttttttttttt

SEQ ID NO: 7416 - DNA, 84 bp, synthetic construct
  source 1..84: mol_type = other DNA
tttttttaagcagtggtatcaacgcagagtacnncgagattgnncgagagatnntttttttttttttttttttttttttttttt

SEQ ID NO: 7417 - DNA, 84 bp, synthetic construct
  source 1..84: mol_type = other DNA
tttttttaagcagtggtatcaacgcagagtacnncgagattgnnacagatggnntttttttttttttttttttttttttttttt

SEQ ID NO: 7418 - DNA, 84 bp, synthetic construct
  source 1..84: mol_type = other DNA
tttttttaagcagtggtatcaacgcagagtacnncgagattgnnaggagtcanntttttttttttttttttttttttttttttt

SEQ ID NO: 7419 - DNA, 84 bp, synthetic construct
  source 1..84: mol_type = other DNA
tttttttaagcagtggtatcaacgcagagtacnncgagattgnncgtgttacnntttttttttttttttttttttttttttttt

SEQ ID NO: 7420 - DNA, 84 bp, synthetic construct
  source 1..84: mol_type = other DNA
tttttttaagcagtggtatcaacgcagagtacnncgagattgnntagtgtgcnntttttttttttttttttttttttttttttt

SEQ ID NO: 7421 - DNA, 84 bp, synthetic construct
  source 1..84: mol_type = other DNA
tttttttaagcagtggtatcaacgcagagtacnncgagattgnnctcatgacnntttttttttttttttttttttttttttttt

SEQ ID NO: 7422 - DNA, 84 bp, synthetic construct
  source 1..84: mol_type = other DNA
tttttttaagcagtggtatcaacgcagagtacnncgagattgnngtatccagnntttttttttttttttttttttttttttttt

SEQ ID NO: 7423 - DNA, 84 bp, synthetic construct
  source 1..84: mol_type = other DNA
tttttttaagcagtggtatcaacgcagagtacnncgagattgnnacgcctatnntttttttttttttttttttttttttttttt

SEQ ID NO: 7424 - DNA, 84 bp, synthetic construct
  source 1..84: mol_type = other DNA
tttttttaagcagtggtatcaacgcagagtacnncgagattgnnaacgacctnntttttttttttttttttttttttttttttt

SEQ ID NO: 7425 - DNA, 84 bp, synthetic construct
  source 1..84: mol_type = other DNA
tttttttaagcagtggtatcaacgcagagtacnncgagattgnnatcaggctnntttttttttttttttttttttttttttttt

SEQ ID NO: 7426 - DNA, 84 bp, synthetic construct
  source 1..84: mol_type = other DNA
tttttttaagcagtggtatcaacgcagagtacnncgagattgnncaagttcgnntttttttttttttttttttttttttttttt

SEQ ID NO: 7427 - DNA, 84 bp, synthetic construct
  source 1..84: mol_type = other DNA
tttttttaagcagtggtatcaacgcagagtacnncgagattgnntagccaganntttttttttttttttttttttttttttttt

SEQ ID NO: 7428 - DNA, 84 bp, synthetic construct
  source 1..84: mol_type = other DNA
tttttttaagcagtggtatcaacgcagagtacnncgagattgnncaatcacgnntttttttttttttttttttttttttttttt

SEQ ID NO: 7429 - DNA, 84 bp, synthetic construct
  source 1..84: mol_type = other DNA
tttttttaagcagtggtatcaacgcagagtacnncgagattgnngcaacaagnntttttttttttttttttttttttttttttt

SEQ ID NO: 7430 - DNA, 84 bp, synthetic construct
  source 1..84: mol_type = other DNA
tttttttaagcagtggtatcaacgcagagtacnncgagattgnncacgacaanntttttttttttttttttttttttttttttt

SEQ ID NO: 7431 - DNA, 84 bp, synthetic construct
  source 1..84: mol_type = other DNA
tttttttaagcagtggtatcaacgcagagtacnncgagattgnntacggaganntttttttttttttttttttttttttttttt

SEQ ID NO: 7432 - DNA, 84 bp, synthetic construct
  source 1..84: mol_type = other DNA
tttttttaagcagtggtatcaacgcagagtacnncgagattgnncgacaaganntttttttttttttttttttttttttttttt

SEQ ID NO: 7433 - DNA, 84 bp, synthetic construct
  source 1..84: mol_type = other DNA
tttttttaagcagtggtatcaacgcagagtacnncgagattgnncgaagtganntttttttttttttttttttttttttttttt

SEQ ID NO: 7434 - DNA, 84 bp, synthetic construct
  source 1..84: mol_type = other DNA
tttttttaagcagtggtatcaacgcagagtacnncgagattgnnagctggtanntttttttttttttttttttttttttttttt

SEQ ID NO: 7435 - DNA, 84 bp, synthetic construct
  source 1..84: mol_type = other DNA
tttttttaagcagtggtatcaacgcagagtacnncgagattgnnaactaggcnntttttttttttttttttttttttttttttt

SEQ ID NO: 7436 - DNA, 84 bp, synthetic construct
  source 1..84: mol_type = other DNA
tttttttaagcagtggtatcaacgcagagtacnncgagattgnncagcaagtnntttttttttttttttttttttttttttttt

SEQ ID NO: 7437 - DNA, 84 bp, synthetic construct
  source 1..84: mol_type = other DNA
tttttttaagcagtggtatcaacgcagagtacnncgagattgnnacgaggtanntttttttttttttttttttttttttttttt

SEQ ID NO: 7438 - DNA, 84 bp, synthetic construct
  source 1..84: mol_type = other DNA
tttttttaagcagtggtatcaacgcagagtacnncgagattgnncatcttccnntttttttttttttttttttttttttttttt

SEQ ID NO: 7439 - DNA, 84 bp, synthetic construct
  source 1..84: mol_type = other DNA
tttttttaagcagtggtatcaacgcagagtacnncgagattgnncctgaatcnntttttttttttttttttttttttttttttt

SEQ ID NO: 7440 - DNA, 84 bp, synthetic construct
  source 1..84: mol_type = other DNA
tttttttaagcagtggtatcaacgcagagtacnncgagattgnntgcagactnntttttttttttttttttttttttttttttt

SEQ ID NO: 7441 - DNA, 84 bp, synthetic construct
  source 1..84: mol_type = other DNA
tttttttaagcagtggtatcaacgcagagtacnncgagattgnnagatgtggnntttttttttttttttttttttttttttttt

SEQ ID NO: 7442 - DNA, 84 bp, synthetic construct
  source 1..84: mol_type = other DNA
tttttttaagcagtggtatcaacgcagagtacnncgagattgnnagttcgacnntttttttttttttttttttttttttttttt

SEQ ID NO: 7443 - DNA, 84 bp, synthetic construct
  source 1..84: mol_type = other DNA
tttttttaagcagtggtatcaacgcagagtacnncgagattgnnacaacctcnntttttttttttttttttttttttttttttt

SEQ ID NO: 7444 - DNA, 84 bp, synthetic construct
  source 1..84: mol_type = other DNA
tttttttaagcagtggtatcaacgcagagtacnncgagattgnncatggtagnntttttttttttttttttttttttttttttt

SEQ ID NO: 7445 - DNA, 84 bp, synthetic construct
  source 1..84: mol_type = other DNA
tttttttaagcagtggtatcaacgcagagtacnncgagattgnncgtatctcnntttttttttttttttttttttttttttttt

SEQ ID NO: 7446 - DNA, 84 bp, synthetic construct
  source 1..84: mol_type = other DNA
tttttttaagcagtggtatcaacgcagagtacnncgagattgnncctagttcnntttttttttttttttttttttttttttttt

SEQ ID NO: 7447 - DNA, 84 bp, synthetic construct
  source 1..84: mol_type = other DNA
tttttttaagcagtggtatcaacgcagagtacnncgagattgnncaagagtcnntttttttttttttttttttttttttttttt

SEQ ID NO: 7448 - DNA, 84 bp, synthetic construct
  source 1..84: mol_type = other DNA
tttttttaagcagtggtatcaacgcagagtacnntgtggaagnnaatcggcanntttttttttttttttttttttttttttttt

SEQ ID NO: 7449 - DNA, 84 bp, synthetic construct
  source 1..84: mol_type = other DNA
tttttttaagcagtggtatcaacgcagagtacnntgtggaagnntacggcatnntttttttttttttttttttttttttttttt

SEQ ID NO: 7450 - DNA, 84 bp, synthetic construct
  source 1..84: mol_type = other DNA
tttttttaagcagtggtatcaacgcagagtacnntgtggaagnnttggatcgnntttttttttttttttttttttttttttttt

SEQ ID NO: 7451 - DNA, 84 bp, synthetic construct
  source 1..84: mol_type = other DNA
tttttttaagcagtggtatcaacgcagagtacnntgtggaagnntggaacganntttttttttttttttttttttttttttttt

SEQ ID NO: 7452 - DNA, 84 bp, synthetic construct
  source 1..84: mol_type = other DNA
tttttttaagcagtggtatcaacgcagagtacnntgtggaagnnggcaatcanntttttttttttttttttttttttttttttt

SEQ ID NO: 7453 - DNA, 84 bp, synthetic construct
  source 1..84: mol_type = other DNA
tttttttaagcagtggtatcaacgcagagtacnntgtggaagnngaatccganntttttttttttttttttttttttttttttt

SEQ ID NO: 7454 - DNA, 84 bp, synthetic construct
  source 1..84: mol_type = other DNA
tttttttaagcagtggtatcaacgcagagtacnntgtggaagnnttacggtgnntttttttttttttttttttttttttttttt

SEQ ID NO: 7455 - DNA, 84 bp, synthetic construct
  source 1..84: mol_type = other DNA
tttttttaagcagtggtatcaacgcagagtacnntgtggaagnncatatcggnntttttttttttttttttttttttttttttt

SEQ ID NO: 7456 - DNA, 84 bp, synthetic construct
  source 1..84: mol_type = other DNA
tttttttaagcagtggtatcaacgcagagtacnntgtggaagnncttcggtanntttttttttttttttttttttttttttttt

SEQ ID NO: 7457 - DNA, 84 bp, synthetic construct
  source 1..84: mol_type = other DNA
tttttttaagcagtggtatcaacgcagagtacnntgtggaagnntcctaacgnntttttttttttttttttttttttttttttt

SEQ ID NO: 7458 - DNA, 84 bp, synthetic construct
  source 1..84: mol_type = other DNA
tttttttaagcagtggtatcaacgcagagtacnntgtggaagnngtaagccanntttttttttttttttttttttttttttttt

SEQ ID NO: 7459 - DNA, 84 bp, synthetic construct
  source 1..84: mol_type = other DNA
tttttttaagcagtggtatcaacgcagagtacnntgtggaagnntaaggtggnntttttttttttttttttttttttttttttt

SEQ ID NO: 7460 - DNA, 84 bp, synthetic construct
  source 1..84: mol_type = other DNA
tttttttaagcagtggtatcaacgcagagtacnntgtggaagnnggtaagctnntttttttttttttttttttttttttttttt

SEQ ID NO: 7461 - DNA, 84 bp, synthetic construct
  source 1..84: mol_type = other DNA
tttttttaagcagtggtatcaacgcagagtacnntgtggaagnntgtgtcganntttttttttttttttttttttttttttttt

SEQ ID NO: 7462 - DNA, 84 bp, synthetic construct
  source 1..84: mol_type = other DNA
tttttttaagcagtggtatcaacgcagagtacnntgtggaagnngagcatganntttttttttttttttttttttttttttttt

SEQ ID NO: 7463 - DNA, 84 bp, synthetic construct
  source 1..84: mol_type = other DNA
tttttttaagcagtggtatcaacgcagagtacnntgtggaagnntcgaagtcnntttttttttttttttttttttttttttttt

SEQ ID NO: 7464 - DNA, 84 bp, synthetic construct
  source 1..84: mol_type = other DNA
tttttttaagcagtggtatcaacgcagagtacnntgtggaagnnggtgaacanntttttttttttttttttttttttttttttt

SEQ ID NO: 7465 - DNA, 84 bp, synthetic construct
  source 1..84: mol_type = other DNA
tttttttaagcagtggtatcaacgcagagtacnntgtggaagnnacatgcacnntttttttttttttttttttttttttttttt

SEQ ID NO: 7466 - DNA, 84 bp, synthetic construct
  source 1..84: mol_type = other DNA
tttttttaagcagtggtatcaacgcagagtacnntgtggaagnnccaacagtnntttttttttttttttttttttttttttttt

SEQ ID NO: 7467 - DNA, 84 bp, synthetic construct
  source 1..84: mol_type = other DNA
tttttttaagcagtggtatcaacgcagagtacnntgtggaagnnagaacagcnntttttttttttttttttttttttttttttt

SEQ ID NO: 7468 - DNA, 84 bp, synthetic construct
  source 1..84: mol_type = other DNA
tttttttaagcagtggtatcaacgcagagtacnntgtggaagnngaacacgtnntttttttttttttttttttttttttttttt

SEQ ID NO: 7469 - DNA, 84 bp, synthetic construct
  source 1..84: mol_type = other DNA
tttttttaagcagtggtatcaacgcagagtacnntgtggaagnnggtcttcanntttttttttttttttttttttttttttttt

SEQ ID NO: 7470 - DNA, 84 bp, synthetic construct
  source 1..84: mol_type = other DNA
tttttttaagcagtggtatcaacgcagagtacnntgtggaagnnaggttcagnntttttttttttttttttttttttttttttt

SEQ ID NO: 7471 - DNA, 84 bp, synthetic construct
  source 1..84: mol_type = other DNA
tttttttaagcagtggtatcaacgcagagtacnntgtggaagnnctagagcanntttttttttttttttttttttttttttttt

SEQ ID NO: 7472 - DNA, 84 bp, synthetic construct
  source 1..84: mol_type = other DNA
tttttttaagcagtggtatcaacgcagagtacnntgtggaagnncttctagcnntttttttttttttttttttttttttttttt

SEQ ID NO: 7473 - DNA, 84 bp, synthetic construct
  source 1..84: mol_type = other DNA
tttttttaagcagtggtatcaacgcagagtacnntgtggaagnngagtaacgnntttttttttttttttttttttttttttttt

SEQ ID NO: 7474 - DNA, 84 bp, synthetic construct
  source 1..84: mol_type = other DNA
tttttttaagcagtggtatcaacgcagagtacnntgtggaagnnctaagaggnntttttttttttttttttttttttttttttt

SEQ ID NO: 7475 - DNA, 84 bp, synthetic construct
  source 1..84: mol_type = other DNA
tttttttaagcagtggtatcaacgcagagtacnntgtggaagnnacgtgtagnntttttttttttttttttttttttttttttt

SEQ ID NO: 7476 - DNA, 84 bp, synthetic construct
  source 1..84: mol_type = other DNA
tttttttaagcagtggtatcaacgcagagtacnntgtggaagnnactacaggnntttttttttttttttttttttttttttttt

SEQ ID NO: 7477 - DNA, 84 bp, synthetic construct
  source 1..84: mol_type = other DNA
tttttttaagcagtggtatcaacgcagagtacnntgtggaagnntacaggtcnntttttttttttttttttttttttttttttt

SEQ ID NO: 7478 - DNA, 84 bp, synthetic construct
  source 1..84: mol_type = other DNA
tttttttaagcagtggtatcaacgcagagtacnntgtggaagnnctcacatgnntttttttttttttttttttttttttttttt

SEQ ID NO: 7479 - DNA, 84 bp, synthetic construct
  source 1..84: mol_type = other DNA
tttttttaagcagtggtatcaacgcagagtacnntgtggaagnnactaggagnntttttttttttttttttttttttttttttt

SEQ ID NO: 7480 - DNA, 84 bp, synthetic construct
  source 1..84: mol_type = other DNA
tttttttaagcagtggtatcaacgcagagtacnntgtggaagnnccatagganntttttttttttttttttttttttttttttt

SEQ ID NO: 7481 - DNA, 84 bp, synthetic construct
  source 1..84: mol_type = other DNA
tttttttaagcagtggtatcaacgcagagtacnntgtggaagnnggagaatcnntttttttttttttttttttttttttttttt

SEQ ID NO: 7482 - DNA, 84 bp, synthetic construct
  source 1..84: mol_type = other DNA
tttttttaagcagtggtatcaacgcagagtacnntgtggaagnngccaagaanntttttttttttttttttttttttttttttt

SEQ ID NO: 7483 - DNA, 84 bp, synthetic construct
  source 1..84: mol_type = other DNA
tttttttaagcagtggtatcaacgcagagtacnntgtggaagnnaaggcaagnntttttttttttttttttttttttttttttt

SEQ ID NO: 7484 - DNA, 84 bp, synthetic construct
  source 1..84: mol_type = other DNA
tttttttaagcagtggtatcaacgcagagtacnntgtggaagnnaatgtcgcnntttttttttttttttttttttttttttttt

SEQ ID NO: 7485 - DNA, 84 bp, synthetic construct
  source 1..84: mol_type = other DNA
tttttttaagcagtggtatcaacgcagagtacnntgtggaagnnatggaaccnntttttttttttttttttttttttttttttt

SEQ ID NO: 7486 - DNA, 84 bp, synthetic construct
  source 1..84: mol_type = other DNA
tttttttaagcagtggtatcaacgcagagtacnntgtggaagnnagaggcatnntttttttttttttttttttttttttttttt

SEQ ID NO: 7487 - DNA, 84 bp, synthetic construct
  source 1..84: mol_type = other DNA
tttttttaagcagtggtatcaacgcagagtacnntgtggaagnntgcatagcnntttttttttttttttttttttttttttttt

SEQ ID NO: 7488 - DNA, 84 bp, synthetic construct
  source 1..84: mol_type = other DNA
tttttttaagcagtggtatcaacgcagagtacnntgtggaagnnctaacgganntttttttttttttttttttttttttttttt

SEQ ID NO: 7489 - DNA, 84 bp, synthetic construct
  source 1..84: mol_type = other DNA
tttttttaagcagtggtatcaacgcagagtacnntgtggaagnntatcgaggnntttttttttttttttttttttttttttttt

SEQ ID NO: 7490 - DNA, 84 bp, synthetic construct
  source 1..84: mol_type = other DNA
tttttttaagcagtggtatcaacgcagagtacnntgtggaagnncatagcctnntttttttttttttttttttttttttttttt

SEQ ID NO: 7491 - DNA, 84 bp, synthetic construct
  source 1..84: mol_type = other DNA
tttttttaagcagtggtatcaacgcagagtacnntgtggaagnnatcgagacnntttttttttttttttttttttttttttttt

SEQ ID NO: 7492 - DNA, 84 bp, synthetic construct
  source 1..84: mol_type = other DNA
tttttttaagcagtggtatcaacgcagagtacnntgtggaagnnggaagagtnntttttttttttttttttttttttttttttt

SEQ ID NO: 7493 - DNA, 84 bp, synthetic construct
  source 1..84: mol_type = other DNA
tttttttaagcagtggtatcaacgcagagtacnntgtggaagnnccaagtagnntttttttttttttttttttttttttttttt

SEQ ID NO: 7494 - DNA, 84 bp, synthetic construct
  source 1..84: mol_type = other DNA
tttttttaagcagtggtatcaacgcagagtacnntgtggaagnnctgaacagnntttttttttttttttttttttttttttttt

SEQ ID NO: 7495 - DNA, 84 bp, synthetic construct
  source 1..84: mol_type = other DNA
tttttttaagcagtggtatcaacgcagagtacnntgtggaagnngtaggttcnntttttttttttttttttttttttttttttt

SEQ ID NO: 7496 - DNA, 84 bp, synthetic construct
  source 1..84: mol_type = other DNA
tttttttaagcagtggtatcaacgcagagtacnntgtggaagnngtatggacnntttttttttttttttttttttttttttttt

SEQ ID NO: 7497 - DNA, 84 bp, synthetic construct
  source 1..84: mol_type = other DNA
tttttttaagcagtggtatcaacgcagagtacnntgtggaagnntcgcaacanntttttttttttttttttttttttttttttt

SEQ ID NO: 7498 - DNA, 84 bp, synthetic construct
  source 1..84: mol_type = other DNA
tttttttaagcagtggtatcaacgcagagtacnntgtggaagnnccgctaatnntttttttttttttttttttttttttttttt

SEQ ID NO: 7499 - DNA, 84 bp, synthetic construct
  source 1..84: mol_type = other DNA
tttttttaagcagtggtatcaacgcagagtacnntgtggaagnngattcgcanntttttttttttttttttttttttttttttt

SEQ ID NO: 7500 - DNA, 84 bp, synthetic construct
  source 1..84: mol_type = other DNA
tttttttaagcagtggtatcaacgcagagtacnntgtggaagnncgatggaanntttttttttttttttttttttttttttttt

SEQ ID NO: 7501 - DNA, 84 bp, synthetic construct
  source 1..84: mol_type = other DNA
tttttttaagcagtggtatcaacgcagagtacnntgtggaagnnagcaagganntttttttttttttttttttttttttttttt

SEQ ID NO: 7502 - DNA, 84 bp, synthetic construct
  source 1..84: mol_type = other DNA
tttttttaagcagtggtatcaacgcagagtacnntgtggaagnncgtagcaanntttttttttttttttttttttttttttttt

SEQ ID NO: 7503 - DNA, 84 bp, synthetic construct
  source 1..84: mol_type = other DNA
tttttttaagcagtggtatcaacgcagagtacnntgtggaagnntggcagtanntttttttttttttttttttttttttttttt

SEQ ID NO: 7504 - DNA, 84 bp, synthetic construct
  source 1..84: mol_type = other DNA
tttttttaagcagtggtatcaacgcagagtacnntgtggaagnncggtagttnntttttttttttttttttttttttttttttt

SEQ ID NO: 7505 - DNA, 84 bp, synthetic construct
  source 1..84: mol_type = other DNA
tttttttaagcagtggtatcaacgcagagtacnntgtggaagnntgacttcgnntttttttttttttttttttttttttttttt

SEQ ID NO: 7506 - DNA, 84 bp, synthetic construct
  source 1..84: mol_type = other DNA
tttttttaagcagtggtatcaacgcagagtacnntgtggaagnngagtgcaanntttttttttttttttttttttttttttttt

SEQ ID NO: 7507 - DNA, 84 bp, synthetic construct
  source 1..84: mol_type = other DNA
tttttttaagcagtggtatcaacgcagagtacnntgtggaagnnacggtaacnntttttttttttttttttttttttttttttt

SEQ ID NO: 7508 - DNA, 84 bp, synthetic construct
  source 1..84: mol_type = other DNA
tttttttaagcagtggtatcaacgcagagtacnntgtggaagnnaagtggtgnntttttttttttttttttttttttttttttt

SEQ ID NO: 7509 - DNA, 84 bp, synthetic construct
  source 1..84: mol_type = other DNA
tttttttaagcagtggtatcaacgcagagtacnntgtggaagnnggagacaanntttttttttttttttttttttttttttttt

SEQ ID NO: 7510 - DNA, 84 bp, synthetic construct
  source 1..84: mol_type = other DNA
tttttttaagcagtggtatcaacgcagagtacnntgtggaagnntcaaggacnntttttttttttttttttttttttttttttt

SEQ ID NO: 7511 - DNA, 84 bp, synthetic construct
  source 1..84: mol_type = other DNA
tttttttaagcagtggtatcaacgcagagtacnntgtggaagnnaagagagcnntttttttttttttttttttttttttttttt

SEQ ID NO: 7512 - DNA, 84 bp, synthetic construct
  source 1..84: mol_type = other DNA
tttttttaagcagtggtatcaacgcagagtacnntgtggaagnncgagagatnntttttttttttttttttttttttttttttt

SEQ ID NO: 7513 - DNA, 84 bp, synthetic construct
  source 1..84: mol_type = other DNA
tttttttaagcagtggtatcaacgcagagtacnntgtggaagnnacagatggnntttttttttttttttttttttttttttttt

SEQ ID NO: 7514 - DNA, 84 bp, synthetic construct
  source 1..84: mol_type = other DNA
tttttttaagcagtggtatcaacgcagagtacnntgtggaagnnaggagtcanntttttttttttttttttttttttttttttt

SEQ ID NO: 7515 - DNA, 84 bp, synthetic construct
  source 1..84: mol_type = other DNA
tttttttaagcagtggtatcaacgcagagtacnntgtggaagnncgtgttacnntttttttttttttttttttttttttttttt

SEQ ID NO: 7516 - DNA, 84 bp, synthetic construct
  source 1..84: mol_type = other DNA
tttttttaagcagtggtatcaacgcagagtacnntgtggaagnntagtgtgcnntttttttttttttttttttttttttttttt

SEQ ID NO: 7517 - DNA, 84 bp, synthetic construct
  source 1..84: mol_type = other DNA
tttttttaagcagtggtatcaacgcagagtacnntgtggaagnnctcatgacnntttttttttttttttttttttttttttttt

SEQ ID NO: 7518 - DNA, 84 bp, synthetic construct
  source 1..84: mol_type = other DNA
tttttttaagcagtggtatcaacgcagagtacnntgtggaagnngtatccagnntttttttttttttttttttttttttttttt

SEQ ID NO: 7519 - DNA, 84 bp, synthetic construct
  source 1..84: mol_type = other DNA
tttttttaagcagtggtatcaacgcagagtacnntgtggaagnnacgcctatnntttttttttttttttttttttttttttttt

SEQ ID NO: 7520 - DNA, 84 bp, synthetic construct
  source 1..84: mol_type = other DNA
tttttttaagcagtggtatcaacgcagagtacnntgtggaagnnaacgacctnntttttttttttttttttttttttttttttt

SEQ ID NO: 7521 - DNA, 84 bp, synthetic construct
  source 1..84: mol_type = other DNA
tttttttaagcagtggtatcaacgcagagtacnntgtggaagnnatcaggctnntttttttttttttttttttttttttttttt

SEQ ID NO: 7522 - DNA, 84 bp, synthetic construct
  source 1..84: mol_type = other DNA
tttttttaagcagtggtatcaacgcagagtacnntgtggaagnncaagttcgnntttttttttttttttttttttttttttttt

SEQ ID NO: 7523 - DNA, 84 bp, synthetic construct
  source 1..84: mol_type = other DNA
tttttttaagcagtggtatcaacgcagagtacnntgtggaagnntagccaganntttttttttttttttttttttttttttttt

SEQ ID NO: 7524 - DNA, 84 bp, synthetic construct
  source 1..84: mol_type = other DNA
tttttttaagcagtggtatcaacgcagagtacnntgtggaagnncaatcacgnntttttttttttttttttttttttttttttt

SEQ ID NO: 7525 - DNA, 84 bp, synthetic construct
  source 1..84: mol_type = other DNA
tttttttaagcagtggtatcaacgcagagtacnntgtggaagnngcaacaagnntttttttttttttttttttttttttttttt

SEQ ID NO: 7526 - DNA, 84 bp, synthetic construct
  source 1..84: mol_type = other DNA
tttttttaagcagtggtatcaacgcagagtacnntgtggaagnncacgacaanntttttttttttttttttttttttttttttt

SEQ ID NO: 7527 - DNA, 84 bp, synthetic construct
  source 1..84: mol_type = other DNA
tttttttaagcagtggtatcaacgcagagtacnntgtggaagnntacggaganntttttttttttttttttttttttttttttt

SEQ ID NO: 7528 - DNA, 84 bp, synthetic construct
  source 1..84: mol_type = other DNA
tttttttaagcagtggtatcaacgcagagtacnntgtggaagnncgacaaganntttttttttttttttttttttttttttttt

SEQ ID NO: 7529 - DNA, 84 bp, synthetic construct
  source 1..84: mol_type = other DNA
tttttttaagcagtggtatcaacgcagagtacnntgtggaagnncgaagtganntttttttttttttttttttttttttttttt

SEQ ID NO: 7530 - DNA, 84 bp, synthetic construct
  source 1..84: mol_type = other DNA
tttttttaagcagtggtatcaacgcagagtacnntgtggaagnnagctggtanntttttttttttttttttttttttttttttt

SEQ ID NO: 7531 - DNA, 84 bp, synthetic construct
  source 1..84: mol_type = other DNA
tttttttaagcagtggtatcaacgcagagtacnntgtggaagnnaactaggcnntttttttttttttttttttttttttttttt

SEQ ID NO: 7532 - DNA, 84 bp, synthetic construct
  source 1..84: mol_type = other DNA
tttttttaagcagtggtatcaacgcagagtacnntgtggaagnncagcaagtnntttttttttttttttttttttttttttttt

SEQ ID NO: 7533 - DNA, 84 bp, synthetic construct
  source 1..84: mol_type = other DNA
tttttttaagcagtggtatcaacgcagagtacnntgtggaagnnacgaggtanntttttttttttttttttttttttttttttt

SEQ ID NO: 7534 - DNA, 84 bp, synthetic construct
  source 1..84: mol_type = other DNA
tttttttaagcagtggtatcaacgcagagtacnntgtggaagnncatcttccnntttttttttttttttttttttttttttttt

SEQ ID NO: 7535 - DNA, 84 bp, synthetic construct
  source 1..84: mol_type = other DNA
tttttttaagcagtggtatcaacgcagagtacnntgtggaagnncctgaatcnntttttttttttttttttttttttttttttt

SEQ ID NO: 7536 - DNA, 84 bp, synthetic construct
  source 1..84: mol_type = other DNA
tttttttaagcagtggtatcaacgcagagtacnntgtggaagnntgcagactnntttttttttttttttttttttttttttttt

SEQ ID NO: 7537 - DNA, 84 bp, synthetic construct
  source 1..84: mol_type = other DNA
tttttttaagcagtggtatcaacgcagagtacnntgtggaagnnagatgtggnntttttttttttttttttttttttttttttt

SEQ ID NO: 7538 - DNA, 84 bp, synthetic construct
  source 1..84: mol_type = other DNA
tttttttaagcagtggtatcaacgcagagtacnntgtggaagnnagttcgacnntttttttttttttttttttttttttttttt

SEQ ID NO: 7539 - DNA, 84 bp, synthetic construct
  source 1..84: mol_type = other DNA
tttttttaagcagtggtatcaacgcagagtacnntgtggaagnnacaacctcnntttttttttttttttttttttttttttttt

SEQ ID NO: 7540 - DNA, 84 bp, synthetic construct
  source 1..84: mol_type = other DNA
tttttttaagcagtggtatcaacgcagagtacnntgtggaagnncatggtagnntttttttttttttttttttttttttttttt

SEQ ID NO: 7541 - DNA, 84 bp, synthetic construct
  source 1..84: mol_type = other DNA
tttttttaagcagtggtatcaacgcagagtacnntgtggaagnncgtatctcnntttttttttttttttttttttttttttttt

SEQ ID NO: 7542 - DNA, 84 bp, synthetic construct
  source 1..84: mol_type = other DNA
tttttttaagcagtggtatcaacgcagagtacnntgtggaagnncctagttcnntttttttttttttttttttttttttttttt

SEQ ID NO: 7543 - DNA, 84 bp, synthetic construct
  source 1..84: mol_type = other DNA
tttttttaagcagtggtatcaacgcagagtacnntgtggaagnncaagagtcnntttttttttttttttttttttttttttttt

SEQ ID NO: 7544 - DNA, 84 bp, synthetic construct
  source 1..84: mol_type = other DNA
tttttttaagcagtggtatcaacgcagagtacnntcttgtggnnaatcggcanntttttttttttttttttttttttttttttt

SEQ ID NO: 7545 - DNA, 84 bp, synthetic construct
  source 1..84: mol_type = other DNA
tttttttaagcagtggtatcaacgcagagtacnntcttgtggnntacggcatnntttttttttttttttttttttttttttttt

SEQ ID NO: 7546 - DNA, 84 bp, synthetic construct
  source 1..84: mol_type = other DNA
tttttttaagcagtggtatcaacgcagagtacnntcttgtggnnttggatcgnntttttttttttttttttttttttttttttt

SEQ ID NO: 7547 - DNA, 84 bp, synthetic construct
  source 1..84: mol_type = other DNA
tttttttaagcagtggtatcaacgcagagtacnntcttgtggnntggaacganntttttttttttttttttttttttttttttt

SEQ ID NO: 7548 - DNA, 84 bp, synthetic construct
  source 1..84: mol_type = other DNA
tttttttaagcagtggtatcaacgcagagtacnntcttgtggnnggcaatcanntttttttttttttttttttttttttttttt

SEQ ID NO: 7549 - DNA, 84 bp, synthetic construct
  source 1..84: mol_type = other DNA
tttttttaagcagtggtatcaacgcagagtacnntcttgtggnngaatccganntttttttttttttttttttttttttttttt

SEQ ID NO: 7550 - DNA, 84 bp, synthetic construct
  source 1..84: mol_type = other DNA
tttttttaagcagtggtatcaacgcagagtacnntcttgtggnnttacggtgnntttttttttttttttttttttttttttttt

SEQ ID NO: 7551 - DNA, 84 bp, synthetic construct
  source 1..84: mol_type = other DNA
tttttttaagcagtggtatcaacgcagagtacnntcttgtggnncatatcggnntttttttttttttttttttttttttttttt

SEQ ID NO: 7552 - DNA, 84 bp, synthetic construct
  source 1..84: mol_type = other DNA
tttttttaagcagtggtatcaacgcagagtacnntcttgtggnncttcggtanntttttttttttttttttttttttttttttt

SEQ ID NO: 7553 - DNA, 84 bp, synthetic construct
  source 1..84: mol_type = other DNA
tttttttaagcagtggtatcaacgcagagtacnntcttgtggnntcctaacgnntttttttttttttttttttttttttttttt

SEQ ID NO: 7554 - DNA, 84 bp, synthetic construct
  source 1..84: mol_type = other DNA
tttttttaagcagtggtatcaacgcagagtacnntcttgtggnngtaagccanntttttttttttttttttttttttttttttt

SEQ ID NO: 7555 - DNA, 84 bp, synthetic construct
  source 1..84: mol_type = other DNA
tttttttaagcagtggtatcaacgcagagtacnntcttgtggnntaaggtggnntttttttttttttttttttttttttttttt

SEQ ID NO: 7556 - DNA, 84 bp, synthetic construct
  source 1..84: mol_type = other DNA
tttttttaagcagtggtatcaacgcagagtacnntcttgtggnnggtaagctnntttttttttttttttttttttttttttttt

SEQ ID NO: 7557 - DNA, 84 bp, synthetic construct
  source 1..84: mol_type = other DNA
tttttttaagcagtggtatcaacgcagagtacnntcttgtggnntgtgtcganntttttttttttttttttttttttttttttt

SEQ ID NO: 7558 - DNA, 84 bp, synthetic construct
  source 1..84: mol_type = other DNA
tttttttaagcagtggtatcaacgcagagtacnntcttgtggnngagcatganntttttttttttttttttttttttttttttt

SEQ ID NO: 7559 - DNA, 84 bp, synthetic construct
  source 1..84: mol_type = other DNA
tttttttaagcagtggtatcaacgcagagtacnntcttgtggnntcgaagtcnntttttttttttttttttttttttttttttt

SEQ ID NO: 7560 - DNA, 84 bp, synthetic construct
  source 1..84: mol_type = other DNA
tttttttaagcagtggtatcaacgcagagtacnntcttgtggnnggtgaacanntttttttttttttttttttttttttttttt

SEQ ID NO: 7561 - DNA, 84 bp, synthetic construct
  source 1..84: mol_type = other DNA
tttttttaagcagtggtatcaacgcagagtacnntcttgtggnnacatgcacnntttttttttttttttttttttttttttttt

SEQ ID NO: 7562 - DNA, 84 bp, synthetic construct
  source 1..84: mol_type = other DNA
tttttttaagcagtggtatcaacgcagagtacnntcttgtggnnccaacagtnntttttttttttttttttttttttttttttt

SEQ ID NO: 7563 - DNA, 84 bp, synthetic construct
  source 1..84: mol_type = other DNA
tttttttaagcagtggtatcaacgcagagtacnntcttgtggnnagaacagcnntttttttttttttttttttttttttttttt

SEQ ID NO: 7564 - DNA, 84 bp, synthetic construct
  source 1..84: mol_type = other DNA
tttttttaagcagtggtatcaacgcagagtacnntcttgtggnngaacacgtnntttttttttttttttttttttttttttttt

SEQ ID NO: 7565 - DNA, 84 bp, synthetic construct
  source 1..84: mol_type = other DNA
tttttttaagcagtggtatcaacgcagagtacnntcttgtggnnggtcttcanntttttttttttttttttttttttttttttt

SEQ ID NO: 7566 - DNA, 84 bp, synthetic construct
  source 1..84: mol_type = other DNA
tttttttaagcagtggtatcaacgcagagtacnntcttgtggnnaggttcagnntttttttttttttttttttttttttttttt

SEQ ID NO: 7567 - DNA, 84 bp, synthetic construct
  source 1..84: mol_type = other DNA
tttttttaagcagtggtatcaacgcagagtacnntcttgtggnnctagagcanntttttttttttttttttttttttttttttt

SEQ ID NO: 7568 - DNA, 84 bp, synthetic construct
  source 1..84: mol_type = other DNA
tttttttaagcagtggtatcaacgcagagtacnntcttgtggnncttctagcnntttttttttttttttttttttttttttttt

SEQ ID NO: 7569 - DNA, 84 bp, synthetic construct
  source 1..84: mol_type = other DNA
tttttttaagcagtggtatcaacgcagagtacnntcttgtggnngagtaacgnntttttttttttttttttttttttttttttt

SEQ ID NO: 7570 - DNA, 84 bp, synthetic construct
  source 1..84: mol_type = other DNA
tttttttaagcagtggtatcaacgcagagtacnntcttgtggnnctaagaggnntttttttttttttttttttttttttttttt

SEQ ID NO: 7571 - DNA, 84 bp, synthetic construct
  source 1..84: mol_type = other DNA
tttttttaagcagtggtatcaacgcagagtacnntcttgtggnnacgtgtagnntttttttttttttttttttttttttttttt

SEQ ID NO: 7572 - DNA, 84 bp, synthetic construct
  source 1..84: mol_type = other DNA
tttttttaagcagtggtatcaacgcagagtacnntcttgtggnnactacaggnntttttttttttttttttttttttttttttt

SEQ ID NO: 7573 - DNA, 84 bp, synthetic construct
  source 1..84: mol_type = other DNA
tttttttaagcagtggtatcaacgcagagtacnntcttgtggnntacaggtcnntttttttttttttttttttttttttttttt

SEQ ID NO: 7574 - DNA, 84 bp, synthetic construct
  source 1..84: mol_type = other DNA
tttttttaagcagtggtatcaacgcagagtacnntcttgtggnnctcacatgnntttttttttttttttttttttttttttttt

SEQ ID NO: 7575 - DNA, 84 bp, synthetic construct
  source 1..84: mol_type = other DNA
tttttttaagcagtggtatcaacgcagagtacnntcttgtggnnactaggagnntttttttttttttttttttttttttttttt

SEQ ID NO: 7576 - DNA, 84 bp, synthetic construct
  source 1..84: mol_type = other DNA
tttttttaagcagtggtatcaacgcagagtacnntcttgtggnnccatagganntttttttttttttttttttttttttttttt

SEQ ID NO: 7577 - DNA, 84 bp, synthetic construct
  source 1..84: mol_type = other DNA
tttttttaagcagtggtatcaacgcagagtacnntcttgtggnnggagaatcnntttttttttttttttttttttttttttttt

SEQ ID NO: 7578 - DNA, 84 bp, synthetic construct
  source 1..84: mol_type = other DNA
tttttttaagcagtggtatcaacgcagagtacnntcttgtggnngccaagaanntttttttttttttttttttttttttttttt

SEQ ID NO: 7579 - DNA, 84 bp, synthetic construct
  source 1..84: mol_type = other DNA
tttttttaagcagtggtatcaacgcagagtacnntcttgtggnnaaggcaagnntttttttttttttttttttttttttttttt

SEQ ID NO: 7580 - DNA, 84 bp, synthetic construct
  source 1..84: mol_type = other DNA
tttttttaagcagtggtatcaacgcagagtacnntcttgtggnnaatgtcgcnntttttttttttttttttttttttttttttt

SEQ ID NO: 7581 - DNA, 84 bp, synthetic construct
  source 1..84: mol_type = other DNA
tttttttaagcagtggtatcaacgcagagtacnntcttgtggnnatggaaccnntttttttttttttttttttttttttttttt

SEQ ID NO: 7582 - DNA, 84 bp, synthetic construct
  source 1..84: mol_type = other DNA
tttttttaagcagtggtatcaacgcagagtacnntcttgtggnnagaggcatnntttttttttttttttttttttttttttttt

SEQ ID NO: 7583 - DNA, 84 bp, synthetic construct
  source 1..84: mol_type = other DNA
tttttttaagcagtggtatcaacgcagagtacnntcttgtggnntgcatagcnntttttttttttttttttttttttttttttt

SEQ ID NO: 7584 - DNA, 84 bp, synthetic construct
  source 1..84: mol_type = other DNA
tttttttaagcagtggtatcaacgcagagtacnntcttgtggnnctaacgganntttttttttttttttttttttttttttttt

SEQ ID NO: 7585 - DNA, 84 bp, synthetic construct
  source 1..84: mol_type = other DNA
tttttttaagcagtggtatcaacgcagagtacnntcttgtggnntatcgaggnntttttttttttttttttttttttttttttt

SEQ ID NO: 7586 - DNA, 84 bp, synthetic construct
  source 1..84: mol_type = other DNA
tttttttaagcagtggtatcaacgcagagtacnntcttgtggnncatagcctnntttttttttttttttttttttttttttttt

SEQ ID NO: 7587 - DNA, 84 bp, synthetic construct
  source 1..84: mol_type = other DNA
tttttttaagcagtggtatcaacgcagagtacnntcttgtggnnatcgagacnntttttttttttttttttttttttttttttt

SEQ ID NO: 7588 - DNA, 84 bp, synthetic construct
  source 1..84: mol_type = other DNA
tttttttaagcagtggtatcaacgcagagtacnntcttgtggnnggaagagtnntttttttttttttttttttttttttttttt

SEQ ID NO: 7589 - DNA, 84 bp, synthetic construct
  source 1..84: mol_type = other DNA
tttttttaagcagtggtatcaacgcagagtacnntcttgtggnnccaagtagnntttttttttttttttttttttttttttttt

SEQ ID NO: 7590 - DNA, 84 bp, synthetic construct
  source 1..84: mol_type = other DNA
tttttttaagcagtggtatcaacgcagagtacnntcttgtggnnctgaacagnntttttttttttttttttttttttttttttt

SEQ ID NO: 7591 - DNA, 84 bp, synthetic construct
  source 1..84: mol_type = other DNA
tttttttaagcagtggtatcaacgcagagtacnntcttgtggnngtaggttcnntttttttttttttttttttttttttttttt

SEQ ID NO: 7592 - DNA, 84 bp, synthetic construct
  source 1..84: mol_type = other DNA
tttttttaagcagtggtatcaacgcagagtacnntcttgtggnngtatggacnntttttttttttttttttttttttttttttt

SEQ ID NO: 7593 - DNA, 84 bp, synthetic construct
  source 1..84: mol_type = other DNA
tttttttaagcagtggtatcaacgcagagtacnntcttgtggnntcgcaacanntttttttttttttttttttttttttttttt

SEQ ID NO: 7594 - DNA, 84 bp, synthetic construct
  source 1..84: mol_type = other DNA
tttttttaagcagtggtatcaacgcagagtacnntcttgtggnnccgctaatnntttttttttttttttttttttttttttttt

SEQ ID NO: 7595 - DNA, 84 bp, synthetic construct
  source 1..84: mol_type = other DNA
tttttttaagcagtggtatcaacgcagagtacnntcttgtggnngattcgcanntttttttttttttttttttttttttttttt

SEQ ID NO: 7596 - DNA, 84 bp, synthetic construct
  source 1..84: mol_type = other DNA
tttttttaagcagtggtatcaacgcagagtacnntcttgtggnncgatggaanntttttttttttttttttttttttttttttt

SEQ ID NO: 7597 - DNA, 84 bp, synthetic construct
  source 1..84: mol_type = other DNA
tttttttaagcagtggtatcaacgcagagtacnntcttgtggnnagcaagganntttttttttttttttttttttttttttttt

SEQ ID NO: 7598 - DNA, 84 bp, synthetic construct
  source 1..84: mol_type = other DNA
tttttttaagcagtggtatcaacgcagagtacnntcttgtggnncgtagcaanntttttttttttttttttttttttttttttt

SEQ ID NO: 7599 - DNA, 84 bp, synthetic construct
  source 1..84: mol_type = other DNA
tttttttaagcagtggtatcaacgcagagtacnntcttgtggnntggcagtanntttttttttttttttttttttttttttttt

SEQ ID NO: 7600 - DNA, 84 bp, synthetic construct
  source 1..84: mol_type = other DNA
tttttttaagcagtggtatcaacgcagagtacnntcttgtggnncggtagttnntttttttttttttttttttttttttttttt

SEQ ID NO: 7601 - DNA, 84 bp, synthetic construct
  source 1..84: mol_type = other DNA
tttttttaagcagtggtatcaacgcagagtacnntcttgtggnntgacttcgnntttttttttttttttttttttttttttttt

SEQ ID NO: 7602 - DNA, 84 bp, synthetic construct
  source 1..84: mol_type = other DNA
tttttttaagcagtggtatcaacgcagagtacnntcttgtggnngagtgcaanntttttttttttttttttttttttttttttt

SEQ ID NO: 7603 - DNA, 84 bp, synthetic construct
  source 1..84: mol_type = other DNA
tttttttaagcagtggtatcaacgcagagtacnntcttgtggnnacggtaacnntttttttttttttttttttttttttttttt

SEQ ID NO: 7604 - DNA, 84 bp, synthetic construct
  source 1..84: mol_type = other DNA
tttttttaagcagtggtatcaacgcagagtacnntcttgtggnnaagtggtgnntttttttttttttttttttttttttttttt

SEQ ID NO: 7605 - DNA, 84 bp, synthetic construct
  source 1..84: mol_type = other DNA
tttttttaagcagtggtatcaacgcagagtacnntcttgtggnnggagacaanntttttttttttttttttttttttttttttt

SEQ ID NO: 7606 - DNA, 84 bp, synthetic construct
  source 1..84: mol_type = other DNA
tttttttaagcagtggtatcaacgcagagtacnntcttgtggnntcaaggacnntttttttttttttttttttttttttttttt

SEQ ID NO: 7607 - DNA, 84 bp, synthetic construct
  source 1..84: mol_type = other DNA
tttttttaagcagtggtatcaacgcagagtacnntcttgtggnnaagagagcnntttttttttttttttttttttttttttttt

SEQ ID NO: 7608 - DNA, 84 bp, synthetic construct
  source 1..84: mol_type = other DNA
tttttttaagcagtggtatcaacgcagagtacnntcttgtggnncgagagatnntttttttttttttttttttttttttttttt

SEQ ID NO: 7609 - DNA, 84 bp, synthetic construct
  source 1..84: mol_type = other DNA
tttttttaagcagtggtatcaacgcagagtacnntcttgtggnnacagatggnntttttttttttttttttttttttttttttt

SEQ ID NO: 7610 - DNA, 84 bp, synthetic construct
  source 1..84: mol_type = other DNA
tttttttaagcagtggtatcaacgcagagtacnntcttgtggnnaggagtcanntttttttttttttttttttttttttttttt

SEQ ID NO: 7611 - DNA, 84 bp, synthetic construct
  source 1..84: mol_type = other DNA
tttttttaagcagtggtatcaacgcagagtacnntcttgtggnncgtgttacnntttttttttttttttttttttttttttttt

SEQ ID NO: 7612 - DNA, 84 bp, synthetic construct
  source 1..84: mol_type = other DNA
tttttttaagcagtggtatcaacgcagagtacnntcttgtggnntagtgtgcnntttttttttttttttttttttttttttttt

SEQ ID NO: 7613 - DNA, 84 bp, synthetic construct
  source 1..84: mol_type = other DNA
tttttttaagcagtggtatcaacgcagagtacnntcttgtggnnctcatgacnntttttttttttttttttttttttttttttt

SEQ ID NO: 7614 - DNA, 84 bp, synthetic construct
  source 1..84: mol_type = other DNA
tttttttaagcagtggtatcaacgcagagtacnntcttgtggnngtatccagnntttttttttttttttttttttttttttttt

SEQ ID NO: 7615 - DNA, 84 bp, synthetic construct
  source 1..84: mol_type = other DNA
tttttttaagcagtggtatcaacgcagagtacnntcttgtggnnacgcctatnntttttttttttttttttttttttttttttt

SEQ ID NO: 7616 - DNA, 84 bp, synthetic construct
  source 1..84: mol_type = other DNA
tttttttaagcagtggtatcaacgcagagtacnntcttgtggnnaacgacctnntttttttttttttttttttttttttttttt

SEQ ID NO: 7617 - DNA, 84 bp, synthetic construct
  source 1..84: mol_type = other DNA
tttttttaagcagtggtatcaacgcagagtacnntcttgtggnnatcaggctnntttttttttttttttttttttttttttttt

SEQ ID NO: 7618 - DNA, 84 bp, synthetic construct
  source 1..84: mol_type = other DNA
tttttttaagcagtggtatcaacgcagagtacnntcttgtggnncaagttcgnntttttttttttttttttttttttttttttt

SEQ ID NO: 7619 - DNA, 84 bp, synthetic construct
  source 1..84: mol_type = other DNA
tttttttaagcagtggtatcaacgcagagtacnntcttgtggnntagccaganntttttttttttttttttttttttttttttt

SEQ ID NO: 7620 - DNA, 84 bp, synthetic construct
  source 1..84: mol_type = other DNA
tttttttaagcagtggtatcaacgcagagtacnntcttgtggnncaatcacgnntttttttttttttttttttttttttttttt

SEQ ID NO: 7621 - DNA, 84 bp, synthetic construct
  source 1..84: mol_type = other DNA
tttttttaagcagtggtatcaacgcagagtacnntcttgtggnngcaacaagnntttttttttttttttttttttttttttttt

SEQ ID NO: 7622 - DNA, 84 bp, synthetic construct
  source 1..84: mol_type = other DNA
tttttttaagcagtggtatcaacgcagagtacnntcttgtggnncacgacaanntttttttttttttttttttttttttttttt

SEQ ID NO: 7623 - DNA, 84 bp, synthetic construct
  source 1..84: mol_type = other DNA
tttttttaagcagtggtatcaacgcagagtacnntcttgtggnntacggaganntttttttttttttttttttttttttttttt

SEQ ID NO: 7624 - DNA, 84 bp, synthetic construct
  source 1..84: mol_type = other DNA
tttttttaagcagtggtatcaacgcagagtacnntcttgtggnncgacaaganntttttttttttttttttttttttttttttt

SEQ ID NO: 7625 - DNA, 84 bp, synthetic construct
  source 1..84: mol_type = other DNA
tttttttaagcagtggtatcaacgcagagtacnntcttgtggnncgaagtganntttttttttttttttttttttttttttttt

SEQ ID NO: 7626 - DNA, 84 bp, synthetic construct
  source 1..84: mol_type = other DNA
tttttttaagcagtggtatcaacgcagagtacnntcttgtggnnagctggtanntttttttttttttttttttttttttttttt

SEQ ID NO: 7627 - DNA, 84 bp, synthetic construct
  source 1..84: mol_type = other DNA
tttttttaagcagtggtatcaacgcagagtacnntcttgtggnnaactaggcnntttttttttttttttttttttttttttttt

SEQ ID NO: 7628 - DNA, 84 bp, synthetic construct
  source 1..84: mol_type = other DNA
tttttttaagcagtggtatcaacgcagagtacnntcttgtggnncagcaagtnntttttttttttttttttttttttttttttt

SEQ ID NO: 7629 - DNA, 84 bp, synthetic construct
  source 1..84: mol_type = other DNA
tttttttaagcagtggtatcaacgcagagtacnntcttgtggnnacgaggtanntttttttttttttttttttttttttttttt

SEQ ID NO: 7630 - DNA, 84 bp, synthetic construct
  source 1..84: mol_type = other DNA
tttttttaagcagtggtatcaacgcagagtacnntcttgtggnncatcttccnntttttttttttttttttttttttttttttt

SEQ ID NO: 7631 - DNA, 84 bp, synthetic construct
  source 1..84: mol_type = other DNA
tttttttaagcagtggtatcaacgcagagtacnntcttgtggnncctgaatcnntttttttttttttttttttttttttttttt

SEQ ID NO: 7632 - DNA, 84 bp, synthetic construct
  source 1..84: mol_type = other DNA
tttttttaagcagtggtatcaacgcagagtacnntcttgtggnntgcagactnntttttttttttttttttttttttttttttt

SEQ ID NO: 7633 - DNA, 84 bp, synthetic construct
  source 1..84: mol_type = other DNA
tttttttaagcagtggtatcaacgcagagtacnntcttgtggnnagatgtggnntttttttttttttttttttttttttttttt

SEQ ID NO: 7634 - DNA, 84 bp, synthetic construct
  source 1..84: mol_type = other DNA
tttttttaagcagtggtatcaacgcagagtacnntcttgtggnnagttcgacnntttttttttttttttttttttttttttttt

SEQ ID NO: 7635 - DNA, 84 bp, synthetic construct
  source 1..84: mol_type = other DNA
tttttttaagcagtggtatcaacgcagagtacnntcttgtggnnacaacctcnntttttttttttttttttttttttttttttt

SEQ ID NO: 7636 - DNA, 84 bp, synthetic construct
  source 1..84: mol_type = other DNA
tttttttaagcagtggtatcaacgcagagtacnntcttgtggnncatggtagnntttttttttttttttttttttttttttttt

SEQ ID NO: 7637 - DNA, 84 bp, synthetic construct
  source 1..84: mol_type = other DNA
tttttttaagcagtggtatcaacgcagagtacnntcttgtggnncgtatctcnntttttttttttttttttttttttttttttt

SEQ ID NO: 7638 - DNA, 84 bp, synthetic construct
  source 1..84: mol_type = other DNA
tttttttaagcagtggtatcaacgcagagtacnntcttgtggnncctagttcnntttttttttttttttttttttttttttttt

SEQ ID NO: 7639 - DNA, 84 bp, synthetic construct
  source 1..84: mol_type = other DNA
tttttttaagcagtggtatcaacgcagagtacnntcttgtggnncaagagtcnntttttttttttttttttttttttttttttt

SEQ ID NO: 7640 - DNA, 84 bp, synthetic construct
  source 1..84: mol_type = other DNA
tttttttaagcagtggtatcaacgcagagtacnnccttcagannaatcggcanntttttttttttttttttttttttttttttt

SEQ ID NO: 7641 - DNA, 84 bp, synthetic construct
  source 1..84: mol_type = other DNA
tttttttaagcagtggtatcaacgcagagtacnnccttcaganntacggcatnntttttttttttttttttttttttttttttt

SEQ ID NO: 7642 - DNA, 84 bp, synthetic construct
  source 1..84: mol_type = other DNA
tttttttaagcagtggtatcaacgcagagtacnnccttcagannttggatcgnntttttttttttttttttttttttttttttt

SEQ ID NO: 7643 - DNA, 84 bp, synthetic construct
  source 1..84: mol_type = other DNA
tttttttaagcagtggtatcaacgcagagtacnnccttcaganntggaacganntttttttttttttttttttttttttttttt

SEQ ID NO: 7644 - DNA, 84 bp, synthetic construct
  source 1..84: mol_type = other DNA
tttttttaagcagtggtatcaacgcagagtacnnccttcagannggcaatcanntttttttttttttttttttttttttttttt

SEQ ID NO: 7645 - DNA, 84 bp, synthetic construct
  source 1..84: mol_type = other DNA
tttttttaagcagtggtatcaacgcagagtacnnccttcaganngaatccganntttttttttttttttttttttttttttttt

SEQ ID NO: 7646 - DNA, 84 bp, synthetic construct
  source 1..84: mol_type = other DNA
tttttttaagcagtggtatcaacgcagagtacnnccttcagannttacggtgnntttttttttttttttttttttttttttttt

SEQ ID NO: 7647 - DNA, 84 bp, synthetic construct
  source 1..84: mol_type = other DNA
tttttttaagcagtggtatcaacgcagagtacnnccttcaganncatatcggnntttttttttttttttttttttttttttttt

SEQ ID NO: 7648 - DNA, 84 bp, synthetic construct
  source 1..84: mol_type = other DNA
tttttttaagcagtggtatcaacgcagagtacnnccttcaganncttcggtanntttttttttttttttttttttttttttttt

SEQ ID NO: 7649 - DNA, 84 bp, synthetic construct
  source 1..84: mol_type = other DNA
tttttttaagcagtggtatcaacgcagagtacnnccttcaganntcctaacgnntttttttttttttttttttttttttttttt

SEQ ID NO: 7650 - DNA, 84 bp, synthetic construct
  source 1..84: mol_type = other DNA
tttttttaagcagtggtatcaacgcagagtacnnccttcaganngtaagccanntttttttttttttttttttttttttttttt

SEQ ID NO: 7651 - DNA, 84 bp, synthetic construct
  source 1..84: mol_type = other DNA
tttttttaagcagtggtatcaacgcagagtacnnccttcaganntaaggtggnntttttttttttttttttttttttttttttt

SEQ ID NO: 7652 - DNA, 84 bp, synthetic construct
  source 1..84: mol_type = other DNA
tttttttaagcagtggtatcaacgcagagtacnnccttcagannggtaagctnntttttttttttttttttttttttttttttt

SEQ ID NO: 7653 - DNA, 84 bp, synthetic construct
  source 1..84: mol_type = other DNA
tttttttaagcagtggtatcaacgcagagtacnnccttcaganntgtgtcganntttttttttttttttttttttttttttttt

SEQ ID NO: 7654 - DNA, 84 bp, synthetic construct
  source 1..84: mol_type = other DNA
tttttttaagcagtggtatcaacgcagagtacnnccttcaganngagcatganntttttttttttttttttttttttttttttt

SEQ ID NO: 7655 - DNA, 84 bp, synthetic construct
  source 1..84: mol_type = other DNA
tttttttaagcagtggtatcaacgcagagtacnnccttcaganntcgaagtcnntttttttttttttttttttttttttttttt

SEQ ID NO: 7656 - DNA, 84 bp, synthetic construct
  source 1..84: mol_type = other DNA
tttttttaagcagtggtatcaacgcagagtacnnccttcagannggtgaacanntttttttttttttttttttttttttttttt

SEQ ID NO: 7657 - DNA, 84 bp, synthetic construct
  source 1..84: mol_type = other DNA
tttttttaagcagtggtatcaacgcagagtacnnccttcagannacatgcacnntttttttttttttttttttttttttttttt

SEQ ID NO: 7658 - DNA, 84 bp, synthetic construct
  source 1..84: mol_type = other DNA
tttttttaagcagtggtatcaacgcagagtacnnccttcagannccaacagtnntttttttttttttttttttttttttttttt

SEQ ID NO: 7659 - DNA, 84 bp, synthetic construct
  source 1..84: mol_type = other DNA
tttttttaagcagtggtatcaacgcagagtacnnccttcagannagaacagcnntttttttttttttttttttttttttttttt

SEQ ID NO: 7660 - DNA, 84 bp, synthetic construct
  source 1..84: mol_type = other DNA
tttttttaagcagtggtatcaacgcagagtacnnccttcaganngaacacgtnntttttttttttttttttttttttttttttt

SEQ ID NO: 7661 - DNA, 84 bp, synthetic construct
  source 1..84: mol_type = other DNA
tttttttaagcagtggtatcaacgcagagtacnnccttcagannggtcttcanntttttttttttttttttttttttttttttt

SEQ ID NO: 7662 - DNA, 84 bp, synthetic construct
  source 1..84: mol_type = other DNA
tttttttaagcagtggtatcaacgcagagtacnnccttcagannaggttcagnntttttttttttttttttttttttttttttt

SEQ ID NO: 7663 - DNA, 84 bp, synthetic construct
  source 1..84: mol_type = other DNA
tttttttaagcagtggtatcaacgcagagtacnnccttcagannctagagcanntttttttttttttttttttttttttttttt

SEQ ID NO: 7664 - DNA, 84 bp, synthetic construct
  source 1..84: mol_type = other DNA
tttttttaagcagtggtatcaacgcagagtacnnccttcaganncttctagcnntttttttttttttttttttttttttttttt

SEQ ID NO: 7665 - DNA, 84 bp, synthetic construct
  source 1..84: mol_type = other DNA
tttttttaagcagtggtatcaacgcagagtacnnccttcaganngagtaacgnntttttttttttttttttttttttttttttt

SEQ ID NO: 7666 - DNA, 84 bp, synthetic construct
  source 1..84: mol_type = other DNA
tttttttaagcagtggtatcaacgcagagtacnnccttcagannctaagaggnntttttttttttttttttttttttttttttt

SEQ ID NO: 7667 - DNA, 84 bp, synthetic construct
  source 1..84: mol_type = other DNA
tttttttaagcagtggtatcaacgcagagtacnnccttcagannacgtgtagnntttttttttttttttttttttttttttttt

SEQ ID NO: 7668 - DNA, 84 bp, synthetic construct
  source 1..84: mol_type = other DNA
tttttttaagcagtggtatcaacgcagagtacnnccttcagannactacaggnntttttttttttttttttttttttttttttt

SEQ ID NO: 7669 - DNA, 84 bp, synthetic construct
  source 1..84: mol_type = other DNA
tttttttaagcagtggtatcaacgcagagtacnnccttcaganntacaggtcnntttttttttttttttttttttttttttttt

SEQ ID NO: 7670 - DNA, 84 bp, synthetic construct
  source 1..84: mol_type = other DNA
tttttttaagcagtggtatcaacgcagagtacnnccttcagannctcacatgnntttttttttttttttttttttttttttttt

SEQ ID NO: 7671 - DNA, 84 bp, synthetic construct
  source 1..84: mol_type = other DNA
tttttttaagcagtggtatcaacgcagagtacnnccttcagannactaggagnntttttttttttttttttttttttttttttt

SEQ ID NO: 7672 - DNA, 84 bp, synthetic construct
  source 1..84: mol_type = other DNA
tttttttaagcagtggtatcaacgcagagtacnnccttcagannccatagganntttttttttttttttttttttttttttttt

SEQ ID NO: 7673 - DNA, 84 bp, synthetic construct
  source 1..84: mol_type = other DNA
tttttttaagcagtggtatcaacgcagagtacnnccttcagannggagaatcnntttttttttttttttttttttttttttttt

SEQ ID NO: 7674 - DNA, 84 bp, synthetic construct
  source 1..84: mol_type = other DNA
tttttttaagcagtggtatcaacgcagagtacnnccttcaganngccaagaanntttttttttttttttttttttttttttttt

SEQ ID NO: 7675 - DNA, 84 bp, synthetic construct
  source 1..84: mol_type = other DNA
tttttttaagcagtggtatcaacgcagagtacnnccttcagannaaggcaagnntttttttttttttttttttttttttttttt

SEQ ID NO: 7676 - DNA, 84 bp, synthetic construct
  source 1..84: mol_type = other DNA
tttttttaagcagtggtatcaacgcagagtacnnccttcagannaatgtcgcnntttttttttttttttttttttttttttttt

SEQ ID NO: 7677 - DNA, 84 bp, synthetic construct
  source 1..84: mol_type = other DNA
tttttttaagcagtggtatcaacgcagagtacnnccttcagannatggaaccnntttttttttttttttttttttttttttttt

SEQ ID NO: 7678 - DNA, 84 bp, synthetic construct
  source 1..84: mol_type = other DNA
tttttttaagcagtggtatcaacgcagagtacnnccttcagannagaggcatnntttttttttttttttttttttttttttttt

SEQ ID NO: 7679 - DNA, 84 bp, synthetic construct
  source 1..84: mol_type = other DNA
tttttttaagcagtggtatcaacgcagagtacnnccttcaganntgcatagcnntttttttttttttttttttttttttttttt

SEQ ID NO: 7680 - DNA, 84 bp, synthetic construct
  source 1..84: mol_type = other DNA
tttttttaagcagtggtatcaacgcagagtacnnccttcagannctaacgganntttttttttttttttttttttttttttttt

SEQ ID NO: 7681 - DNA, 84 bp, synthetic construct
  source 1..84: mol_type = other DNA
tttttttaagcagtggtatcaacgcagagtacnnccttcaganntatcgaggnntttttttttttttttttttttttttttttt

SEQ ID NO: 7682 - DNA, 84 bp, synthetic construct
  source 1..84: mol_type = other DNA
tttttttaagcagtggtatcaacgcagagtacnnccttcaganncatagcctnntttttttttttttttttttttttttttttt

SEQ ID NO: 7683 - DNA, 84 bp, synthetic construct
  source 1..84: mol_type = other DNA
tttttttaagcagtggtatcaacgcagagtacnnccttcagannatcgagacnntttttttttttttttttttttttttttttt

SEQ ID NO: 7684 - DNA, 84 bp, synthetic construct
  source 1..84: mol_type = other DNA
tttttttaagcagtggtatcaacgcagagtacnnccttcagannggaagagtnntttttttttttttttttttttttttttttt

SEQ ID NO: 7685 - DNA, 84 bp, synthetic construct
  source 1..84: mol_type = other DNA
tttttttaagcagtggtatcaacgcagagtacnnccttcagannccaagtagnntttttttttttttttttttttttttttttt

SEQ ID NO: 7686 - DNA, 84 bp, synthetic construct
  source 1..84: mol_type = other DNA
tttttttaagcagtggtatcaacgcagagtacnnccttcagannctgaacagnntttttttttttttttttttttttttttttt

SEQ ID NO: 7687 - DNA, 84 bp, synthetic construct
  source 1..84: mol_type = other DNA
tttttttaagcagtggtatcaacgcagagtacnnccttcaganngtaggttcnntttttttttttttttttttttttttttttt

SEQ ID NO: 7688 - DNA, 84 bp, synthetic construct
  source 1..84: mol_type = other DNA
tttttttaagcagtggtatcaacgcagagtacnnccttcaganngtatggacnntttttttttttttttttttttttttttttt

SEQ ID NO: 7689 - DNA, 84 bp, synthetic construct
  source 1..84: mol_type = other DNA
tttttttaagcagtggtatcaacgcagagtacnnccttcaganntcgcaacanntttttttttttttttttttttttttttttt

SEQ ID NO: 7690 - DNA, 84 bp, synthetic construct
  source 1..84: mol_type = other DNA
tttttttaagcagtggtatcaacgcagagtacnnccttcagannccgctaatnntttttttttttttttttttttttttttttt

SEQ ID NO: 7691 - DNA, 84 bp, synthetic construct
  source 1..84: mol_type = other DNA
tttttttaagcagtggtatcaacgcagagtacnnccttcaganngattcgcanntttttttttttttttttttttttttttttt

SEQ ID NO: 7692 - DNA, 84 bp, synthetic construct
  source 1..84: mol_type = other DNA
tttttttaagcagtggtatcaacgcagagtacnnccttcaganncgatggaanntttttttttttttttttttttttttttttt

SEQ ID NO: 7693 - DNA, 84 bp, synthetic construct
  source 1..84: mol_type = other DNA
tttttttaagcagtggtatcaacgcagagtacnnccttcagannagcaagganntttttttttttttttttttttttttttttt

SEQ ID NO: 7694 - DNA, 84 bp, synthetic construct
  source 1..84: mol_type = other DNA
tttttttaagcagtggtatcaacgcagagtacnnccttcaganncgtagcaanntttttttttttttttttttttttttttttt

SEQ ID NO: 7695 - DNA, 84 bp, synthetic construct
  source 1..84: mol_type = other DNA
tttttttaagcagtggtatcaacgcagagtacnnccttcaganntggcagtanntttttttttttttttttttttttttttttt

SEQ ID NO: 7696 - DNA, 84 bp, synthetic construct
  source 1..84: mol_type = other DNA
tttttttaagcagtggtatcaacgcagagtacnnccttcaganncggtagttnntttttttttttttttttttttttttttttt

SEQ ID NO: 7697 - DNA, 84 bp, synthetic construct
  source 1..84: mol_type = other DNA
tttttttaagcagtggtatcaacgcagagtacnnccttcaganntgacttcgnntttttttttttttttttttttttttttttt

SEQ ID NO: 7698 - DNA, 84 bp, synthetic construct
  source 1..84: mol_type = other DNA
tttttttaagcagtggtatcaacgcagagtacnnccttcaganngagtgcaanntttttttttttttttttttttttttttttt

SEQ ID NO: 7699 - DNA, 84 bp, synthetic construct
  source 1..84: mol_type = other DNA
tttttttaagcagtggtatcaacgcagagtacnnccttcagannacggtaacnntttttttttttttttttttttttttttttt

SEQ ID NO: 7700 - DNA, 84 bp, synthetic construct
  source 1..84: mol_type = other DNA
tttttttaagcagtggtatcaacgcagagtacnnccttcagannaagtggtgnntttttttttttttttttttttttttttttt

SEQ ID NO: 7701 - DNA, 84 bp, synthetic construct
  source 1..84: mol_type = other DNA
tttttttaagcagtggtatcaacgcagagtacnnccttcagannggagacaanntttttttttttttttttttttttttttttt

SEQ ID NO: 7702 - DNA, 84 bp, synthetic construct
  source 1..84: mol_type = other DNA
tttttttaagcagtggtatcaacgcagagtacnnccttcaganntcaaggacnntttttttttttttttttttttttttttttt

SEQ ID NO: 7703 - DNA, 84 bp, synthetic construct
  source 1..84: mol_type = other DNA
tttttttaagcagtggtatcaacgcagagtacnnccttcagannaagagagcnntttttttttttttttttttttttttttttt

SEQ ID NO: 7704 - DNA, 84 bp, synthetic construct
  source 1..84: mol_type = other DNA
tttttttaagcagtggtatcaacgcagagtacnnccttcaganncgagagatnntttttttttttttttttttttttttttttt

SEQ ID NO: 7705 - DNA, 84 bp, synthetic construct
  source 1..84: mol_type = other DNA
tttttttaagcagtggtatcaacgcagagtacnnccttcagannacagatggnntttttttttttttttttttttttttttttt

SEQ ID NO: 7706 - DNA, 84 bp, synthetic construct
  source 1..84: mol_type = other DNA
tttttttaagcagtggtatcaacgcagagtacnnccttcagannaggagtcanntttttttttttttttttttttttttttttt

SEQ ID NO: 7707 - DNA, 84 bp, synthetic construct
  source 1..84: mol_type = other DNA
tttttttaagcagtggtatcaacgcagagtacnnccttcaganncgtgttacnntttttttttttttttttttttttttttttt

SEQ ID NO: 7708 - DNA, 84 bp, synthetic construct
  source 1..84: mol_type = other DNA
tttttttaagcagtggtatcaacgcagagtacnnccttcaganntagtgtgcnntttttttttttttttttttttttttttttt

SEQ ID NO: 7709 - DNA, 84 bp, synthetic construct
  source 1..84: mol_type = other DNA
tttttttaagcagtggtatcaacgcagagtacnnccttcagannctcatgacnntttttttttttttttttttttttttttttt

SEQ ID NO: 7710 - DNA, 84 bp, synthetic construct
  source 1..84: mol_type = other DNA
tttttttaagcagtggtatcaacgcagagtacnnccttcaganngtatccagnntttttttttttttttttttttttttttttt

SEQ ID NO: 7711 - DNA, 84 bp, synthetic construct
  source 1..84: mol_type = other DNA
tttttttaagcagtggtatcaacgcagagtacnnccttcagannacgcctatnntttttttttttttttttttttttttttttt

SEQ ID NO: 7712 - DNA, 84 bp, synthetic construct
  source 1..84: mol_type = other DNA
tttttttaagcagtggtatcaacgcagagtacnnccttcagannaacgacctnntttttttttttttttttttttttttttttt

SEQ ID NO: 7713 - DNA, 84 bp, synthetic construct
  source 1..84: mol_type = other DNA
tttttttaagcagtggtatcaacgcagagtacnnccttcagannatcaggctnntttttttttttttttttttttttttttttt

SEQ ID NO: 7714 - DNA, 84 bp, synthetic construct
  source 1..84: mol_type = other DNA
tttttttaagcagtggtatcaacgcagagtacnnccttcaganncaagttcgnntttttttttttttttttttttttttttttt

SEQ ID NO: 7715 - DNA, 84 bp, synthetic construct
  source 1..84: mol_type = other DNA
tttttttaagcagtggtatcaacgcagagtacnnccttcaganntagccaganntttttttttttttttttttttttttttttt

SEQ ID NO: 7716 - DNA, 84 bp, synthetic construct
  source 1..84: mol_type = other DNA
tttttttaagcagtggtatcaacgcagagtacnnccttcaganncaatcacgnntttttttttttttttttttttttttttttt

SEQ ID NO: 7717 - DNA, 84 bp, synthetic construct
  source 1..84: mol_type = other DNA
tttttttaagcagtggtatcaacgcagagtacnnccttcaganngcaacaagnntttttttttttttttttttttttttttttt

SEQ ID NO: 7718 - DNA, 84 bp, synthetic construct
  source 1..84: mol_type = other DNA
tttttttaagcagtggtatcaacgcagagtacnnccttcaganncacgacaanntttttttttttttttttttttttttttttt

SEQ ID NO: 7719 - DNA, 84 bp, synthetic construct
  source 1..84: mol_type = other DNA
tttttttaagcagtggtatcaacgcagagtacnnccttcaganntacggaganntttttttttttttttttttttttttttttt

SEQ ID NO: 7720 - DNA, 84 bp, synthetic construct
  source 1..84: mol_type = other DNA
tttttttaagcagtggtatcaacgcagagtacnnccttcaganncgacaaganntttttttttttttttttttttttttttttt

SEQ ID NO: 7721 - DNA, 84 bp, synthetic construct
  source 1..84: mol_type = other DNA
tttttttaagcagtggtatcaacgcagagtacnnccttcaganncgaagtganntttttttttttttttttttttttttttttt

SEQ ID NO: 7722 - DNA, 84 bp, synthetic construct
  source 1..84: mol_type = other DNA
tttttttaagcagtggtatcaacgcagagtacnnccttcagannagctggtanntttttttttttttttttttttttttttttt

SEQ ID NO: 7723 - DNA, 84 bp, synthetic construct
  source 1..84: mol_type = other DNA
tttttttaagcagtggtatcaacgcagagtacnnccttcagannaactaggcnntttttttttttttttttttttttttttttt

SEQ ID NO: 7724 - DNA, 84 bp, synthetic construct
  source 1..84: mol_type = other DNA
tttttttaagcagtggtatcaacgcagagtacnnccttcaganncagcaagtnntttttttttttttttttttttttttttttt

SEQ ID NO: 7725 - DNA, 84 bp, synthetic construct
  source 1..84: mol_type = other DNA
tttttttaagcagtggtatcaacgcagagtacnnccttcagannacgaggtanntttttttttttttttttttttttttttttt

SEQ ID NO: 7726 - DNA, 84 bp, synthetic construct
  source 1..84: mol_type = other DNA
tttttttaagcagtggtatcaacgcagagtacnnccttcaganncatcttccnntttttttttttttttttttttttttttttt

SEQ ID NO: 7727 - DNA, 84 bp, synthetic construct
  source 1..84: mol_type = other DNA
tttttttaagcagtggtatcaacgcagagtacnnccttcaganncctgaatcnntttttttttttttttttttttttttttttt

SEQ ID NO: 7728 - DNA, 84 bp, synthetic construct
  source 1..84: mol_type = other DNA
tttttttaagcagtggtatcaacgcagagtacnnccttcaganntgcagactnntttttttttttttttttttttttttttttt

SEQ ID NO: 7729 - DNA, 84 bp, synthetic construct
  source 1..84: mol_type = other DNA
tttttttaagcagtggtatcaacgcagagtacnnccttcagannagatgtggnntttttttttttttttttttttttttttttt

SEQ ID NO: 7730 - DNA, 84 bp, synthetic construct
  source 1..84: mol_type = other DNA
tttttttaagcagtggtatcaacgcagagtacnnccttcagannagttcgacnntttttttttttttttttttttttttttttt

SEQ ID NO: 7731 - DNA, 84 bp, synthetic construct
  source 1..84: mol_type = other DNA
tttttttaagcagtggtatcaacgcagagtacnnccttcagannacaacctcnntttttttttttttttttttttttttttttt

SEQ ID NO: 7732 - DNA, 84 bp, synthetic construct
  source 1..84: mol_type = other DNA
tttttttaagcagtggtatcaacgcagagtacnnccttcaganncatggtagnntttttttttttttttttttttttttttttt

SEQ ID NO: 7733 - DNA, 84 bp, synthetic construct
  source 1..84: mol_type = other DNA
tttttttaagcagtggtatcaacgcagagtacnnccttcaganncgtatctcnntttttttttttttttttttttttttttttt

SEQ ID NO: 7734 - DNA, 84 bp, synthetic construct
  source 1..84: mol_type = other DNA
tttttttaagcagtggtatcaacgcagagtacnnccttcaganncctagttcnntttttttttttttttttttttttttttttt

SEQ ID NO: 7735 - DNA, 84 bp, synthetic construct
  source 1..84: mol_type = other DNA
tttttttaagcagtggtatcaacgcagagtacnnccttcaganncaagagtcnntttttttttttttttttttttttttttttt

SEQ ID NO: 7736 - DNA, 84 bp, synthetic construct
  source 1..84: mol_type = other DNA
tttttttaagcagtggtatcaacgcagagtacnncctcatgtnnaatcggcanntttttttttttttttttttttttttttttt

SEQ ID NO: 7737 - DNA, 84 bp, synthetic construct
  source 1..84: mol_type = other DNA
tttttttaagcagtggtatcaacgcagagtacnncctcatgtnntacggcatnntttttttttttttttttttttttttttttt

SEQ ID NO: 7738 - DNA, 84 bp, synthetic construct
  source 1..84: mol_type = other DNA
tttttttaagcagtggtatcaacgcagagtacnncctcatgtnnttggatcgnntttttttttttttttttttttttttttttt

SEQ ID NO: 7739 - DNA, 84 bp, synthetic construct
  source 1..84: mol_type = other DNA
tttttttaagcagtggtatcaacgcagagtacnncctcatgtnntggaacganntttttttttttttttttttttttttttttt

SEQ ID NO: 7740 - DNA, 84 bp, synthetic construct
  source 1..84: mol_type = other DNA
tttttttaagcagtggtatcaacgcagagtacnncctcatgtnnggcaatcanntttttttttttttttttttttttttttttt

SEQ ID NO: 7741 - DNA, 84 bp, synthetic construct
  source 1..84: mol_type = other DNA
tttttttaagcagtggtatcaacgcagagtacnncctcatgtnngaatccganntttttttttttttttttttttttttttttt

SEQ ID NO: 7742 - DNA, 84 bp, synthetic construct
  source 1..84: mol_type = other DNA
tttttttaagcagtggtatcaacgcagagtacnncctcatgtnnttacggtgnntttttttttttttttttttttttttttttt

SEQ ID NO: 7743 - DNA, 84 bp, synthetic construct
  source 1..84: mol_type = other DNA
tttttttaagcagtggtatcaacgcagagtacnncctcatgtnncatatcggnntttttttttttttttttttttttttttttt

SEQ ID NO: 7744 - DNA, 84 bp, synthetic construct
  source 1..84: mol_type = other DNA
tttttttaagcagtggtatcaacgcagagtacnncctcatgtnncttcggtanntttttttttttttttttttttttttttttt

SEQ ID NO: 7745 - DNA, 84 bp, synthetic construct
  source 1..84: mol_type = other DNA
tttttttaagcagtggtatcaacgcagagtacnncctcatgtnntcctaacgnntttttttttttttttttttttttttttttt

SEQ ID NO: 7746 - DNA, 84 bp, synthetic construct
  source 1..84: mol_type = other DNA
tttttttaagcagtggtatcaacgcagagtacnncctcatgtnngtaagccanntttttttttttttttttttttttttttttt

SEQ ID NO: 7747 - DNA, 84 bp, synthetic construct
  source 1..84: mol_type = other DNA
tttttttaagcagtggtatcaacgcagagtacnncctcatgtnntaaggtggnntttttttttttttttttttttttttttttt

SEQ ID NO: 7748 - DNA, 84 bp, synthetic construct
  source 1..84: mol_type = other DNA
tttttttaagcagtggtatcaacgcagagtacnncctcatgtnnggtaagctnntttttttttttttttttttttttttttttt

SEQ ID NO: 7749 - DNA, 84 bp, synthetic construct
  source 1..84: mol_type = other DNA
tttttttaagcagtggtatcaacgcagagtacnncctcatgtnntgtgtcganntttttttttttttttttttttttttttttt

SEQ ID NO: 7750 - DNA, 84 bp, synthetic construct
  source 1..84: mol_type = other DNA
tttttttaagcagtggtatcaacgcagagtacnncctcatgtnngagcatganntttttttttttttttttttttttttttttt

SEQ ID NO: 7751 - DNA, 84 bp, synthetic construct
  source 1..84: mol_type = other DNA
tttttttaagcagtggtatcaacgcagagtacnncctcatgtnntcgaagtcnntttttttttttttttttttttttttttttt

SEQ ID NO: 7752 - DNA, 84 bp, synthetic construct
  source 1..84: mol_type = other DNA
tttttttaagcagtggtatcaacgcagagtacnncctcatgtnnggtgaacanntttttttttttttttttttttttttttttt

SEQ ID NO: 7753 - DNA, 84 bp, synthetic construct
  source 1..84: mol_type = other DNA
tttttttaagcagtggtatcaacgcagagtacnncctcatgtnnacatgcacnntttttttttttttttttttttttttttttt

SEQ ID NO: 7754 - DNA, 84 bp, synthetic construct
  source 1..84: mol_type = other DNA
tttttttaagcagtggtatcaacgcagagtacnncctcatgtnnccaacagtnntttttttttttttttttttttttttttttt

SEQ ID NO: 7755 - DNA, 84 bp, synthetic construct
  source 1..84: mol_type = other DNA
tttttttaagcagtggtatcaacgcagagtacnncctcatgtnnagaacagcnntttttttttttttttttttttttttttttt

SEQ ID NO: 7756 - DNA, 84 bp, synthetic construct
  source 1..84: mol_type = other DNA
tttttttaagcagtggtatcaacgcagagtacnncctcatgtnngaacacgtnntttttttttttttttttttttttttttttt

SEQ ID NO: 7757 - DNA, 84 bp, synthetic construct
  source 1..84: mol_type = other DNA
tttttttaagcagtggtatcaacgcagagtacnncctcatgtnnggtcttcanntttttttttttttttttttttttttttttt

SEQ ID NO: 7758 - DNA, 84 bp, synthetic construct
  source 1..84: mol_type = other DNA
tttttttaagcagtggtatcaacgcagagtacnncctcatgtnnaggttcagnntttttttttttttttttttttttttttttt

SEQ ID NO: 7759 - DNA, 84 bp, synthetic construct
  source 1..84: mol_type = other DNA
tttttttaagcagtggtatcaacgcagagtacnncctcatgtnnctagagcanntttttttttttttttttttttttttttttt

SEQ ID NO: 7760 - DNA, 84 bp, synthetic construct
  source 1..84: mol_type = other DNA
tttttttaagcagtggtatcaacgcagagtacnncctcatgtnncttctagcnntttttttttttttttttttttttttttttt

SEQ ID NO: 7761 - DNA, 84 bp, synthetic construct
  source 1..84: mol_type = other DNA
tttttttaagcagtggtatcaacgcagagtacnncctcatgtnngagtaacgnntttttttttttttttttttttttttttttt

SEQ ID NO: 7762 - DNA, 84 bp, synthetic construct
  source 1..84: mol_type = other DNA
tttttttaagcagtggtatcaacgcagagtacnncctcatgtnnctaagaggnntttttttttttttttttttttttttttttt

SEQ ID NO: 7763 - DNA, 84 bp, synthetic construct
  source 1..84: mol_type = other DNA
tttttttaagcagtggtatcaacgcagagtacnncctcatgtnnacgtgtagnntttttttttttttttttttttttttttttt

SEQ ID NO: 7764 - DNA, 84 bp, synthetic construct
  source 1..84: mol_type = other DNA
tttttttaagcagtggtatcaacgcagagtacnncctcatgtnnactacaggnntttttttttttttttttttttttttttttt

SEQ ID NO: 7765 - DNA, 84 bp, synthetic construct
  source 1..84: mol_type = other DNA
tttttttaagcagtggtatcaacgcagagtacnncctcatgtnntacaggtcnntttttttttttttttttttttttttttttt

SEQ ID NO: 7766 - DNA, 84 bp, synthetic construct
  source 1..84: mol_type = other DNA
tttttttaagcagtggtatcaacgcagagtacnncctcatgtnnctcacatgnntttttttttttttttttttttttttttttt

SEQ ID NO: 7767 - DNA, 84 bp, synthetic construct
  source 1..84: mol_type = other DNA
tttttttaagcagtggtatcaacgcagagtacnncctcatgtnnactaggagnntttttttttttttttttttttttttttttt

SEQ ID NO: 7768 - DNA, 84 bp, synthetic construct
  source 1..84: mol_type = other DNA
tttttttaagcagtggtatcaacgcagagtacnncctcatgtnnccatagganntttttttttttttttttttttttttttttt

SEQ ID NO: 7769 - DNA, 84 bp, synthetic construct
  source 1..84: mol_type = other DNA
tttttttaagcagtggtatcaacgcagagtacnncctcatgtnnggagaatcnntttttttttttttttttttttttttttttt

SEQ ID NO: 7770 - DNA, 84 bp, synthetic construct
  source 1..84: mol_type = other DNA
tttttttaagcagtggtatcaacgcagagtacnncctcatgtnngccaagaanntttttttttttttttttttttttttttttt

SEQ ID NO: 7771 - DNA, 84 bp, synthetic construct
  source 1..84: mol_type = other DNA
tttttttaagcagtggtatcaacgcagagtacnncctcatgtnnaaggcaagnntttttttttttttttttttttttttttttt

SEQ ID NO: 7772 - DNA, 84 bp, synthetic construct
  source 1..84: mol_type = other DNA
tttttttaagcagtggtatcaacgcagagtacnncctcatgtnnaatgtcgcnntttttttttttttttttttttttttttttt

SEQ ID NO: 7773 - DNA, 84 bp, synthetic construct
  source 1..84: mol_type = other DNA
tttttttaagcagtggtatcaacgcagagtacnncctcatgtnnatggaaccnntttttttttttttttttttttttttttttt

SEQ ID NO: 7774 - DNA, 84 bp, synthetic construct
  source 1..84: mol_type = other DNA
tttttttaagcagtggtatcaacgcagagtacnncctcatgtnnagaggcatnntttttttttttttttttttttttttttttt

SEQ ID NO: 7775 - DNA, 84 bp, synthetic construct
  source 1..84: mol_type = other DNA
tttttttaagcagtggtatcaacgcagagtacnncctcatgtnntgcatagcnntttttttttttttttttttttttttttttt

SEQ ID NO: 7776 - DNA, 84 bp, synthetic construct
  source 1..84: mol_type = other DNA
tttttttaagcagtggtatcaacgcagagtacnncctcatgtnnctaacgganntttttttttttttttttttttttttttttt

SEQ ID NO: 7777 - DNA, 84 bp, synthetic construct
  source 1..84: mol_type = other DNA
tttttttaagcagtggtatcaacgcagagtacnncctcatgtnntatcgaggnntttttttttttttttttttttttttttttt

SEQ ID NO: 7778 - DNA, 84 bp, synthetic construct
  source 1..84: mol_type = other DNA
tttttttaagcagtggtatcaacgcagagtacnncctcatgtnncatagcctnntttttttttttttttttttttttttttttt

SEQ ID NO: 7779 - DNA, 84 bp, synthetic construct
  source 1..84: mol_type = other DNA
tttttttaagcagtggtatcaacgcagagtacnncctcatgtnnatcgagacnntttttttttttttttttttttttttttttt

SEQ ID NO: 7780 - DNA, 84 bp, synthetic construct
  source 1..84: mol_type = other DNA
tttttttaagcagtggtatcaacgcagagtacnncctcatgtnnggaagagtnntttttttttttttttttttttttttttttt

SEQ ID NO: 7781 - DNA, 84 bp, synthetic construct
  source 1..84: mol_type = other DNA
tttttttaagcagtggtatcaacgcagagtacnncctcatgtnnccaagtagnntttttttttttttttttttttttttttttt

SEQ ID NO: 7782 - DNA, 84 bp, synthetic construct
  source 1..84: mol_type = other DNA
tttttttaagcagtggtatcaacgcagagtacnncctcatgtnnctgaacagnntttttttttttttttttttttttttttttt

SEQ ID NO: 7783 - DNA, 84 bp, synthetic construct
  source 1..84: mol_type = other DNA
tttttttaagcagtggtatcaacgcagagtacnncctcatgtnngtaggttcnntttttttttttttttttttttttttttttt

SEQ ID NO: 7784 - DNA, 84 bp, synthetic construct
  source 1..84: mol_type = other DNA
tttttttaagcagtggtatcaacgcagagtacnncctcatgtnngtatggacnntttttttttttttttttttttttttttttt

SEQ ID NO: 7785 - DNA, 84 bp, synthetic construct
  source 1..84: mol_type = other DNA
tttttttaagcagtggtatcaacgcagagtacnncctcatgtnntcgcaacanntttttttttttttttttttttttttttttt

SEQ ID NO: 7786 - DNA, 84 bp, synthetic construct
  source 1..84: mol_type = other DNA
tttttttaagcagtggtatcaacgcagagtacnncctcatgtnnccgctaatnntttttttttttttttttttttttttttttt

SEQ ID NO: 7787 - DNA, 84 bp, synthetic construct
  source 1..84: mol_type = other DNA
tttttttaagcagtggtatcaacgcagagtacnncctcatgtnngattcgcanntttttttttttttttttttttttttttttt

SEQ ID NO: 7788 - DNA, 84 bp, synthetic construct
  source 1..84: mol_type = other DNA
tttttttaagcagtggtatcaacgcagagtacnncctcatgtnncgatggaanntttttttttttttttttttttttttttttt

SEQ ID NO: 7789 - DNA, 84 bp, synthetic construct
  source 1..84: mol_type = other DNA
tttttttaagcagtggtatcaacgcagagtacnncctcatgtnnagcaagganntttttttttttttttttttttttttttttt

SEQ ID NO: 7790 - DNA, 84 bp, synthetic construct
  source 1..84: mol_type = other DNA
tttttttaagcagtggtatcaacgcagagtacnncctcatgtnncgtagcaanntttttttttttttttttttttttttttttt

SEQ ID NO: 7791 - DNA, 84 bp, synthetic construct
  source 1..84: mol_type = other DNA
tttttttaagcagtggtatcaacgcagagtacnncctcatgtnntggcagtanntttttttttttttttttttttttttttttt

SEQ ID NO: 7792 - DNA, 84 bp, synthetic construct
  source 1..84: mol_type = other DNA
tttttttaagcagtggtatcaacgcagagtacnncctcatgtnncggtagttnntttttttttttttttttttttttttttttt

SEQ ID NO: 7793 - DNA, 84 bp, synthetic construct
  source 1..84: mol_type = other DNA
tttttttaagcagtggtatcaacgcagagtacnncctcatgtnntgacttcgnntttttttttttttttttttttttttttttt

SEQ ID NO: 7794 - DNA, 84 bp, synthetic construct
  source 1..84: mol_type = other DNA
tttttttaagcagtggtatcaacgcagagtacnncctcatgtnngagtgcaanntttttttttttttttttttttttttttttt

SEQ ID NO: 7795 - DNA, 84 bp, synthetic construct
  source 1..84: mol_type = other DNA
tttttttaagcagtggtatcaacgcagagtacnncctcatgtnnacggtaacnntttttttttttttttttttttttttttttt

SEQ ID NO: 7796 - DNA, 84 bp, synthetic construct
  source 1..84: mol_type = other DNA
tttttttaagcagtggtatcaacgcagagtacnncctcatgtnnaagtggtgnntttttttttttttttttttttttttttttt

SEQ ID NO: 7797 - DNA, 84 bp, synthetic construct
  source 1..84: mol_type = other DNA
tttttttaagcagtggtatcaacgcagagtacnncctcatgtnnggagacaanntttttttttttttttttttttttttttttt

SEQ ID NO: 7798 - DNA, 84 bp, synthetic construct
  source 1..84: mol_type = other DNA
tttttttaagcagtggtatcaacgcagagtacnncctcatgtnntcaaggacnntttttttttttttttttttttttttttttt

SEQ ID NO: 7799 - DNA, 84 bp, synthetic construct
  source 1..84: mol_type = other DNA
tttttttaagcagtggtatcaacgcagagtacnncctcatgtnnaagagagcnntttttttttttttttttttttttttttttt

SEQ ID NO: 7800 - DNA, 84 bp, synthetic construct
  source 1..84: mol_type = other DNA
tttttttaagcagtggtatcaacgcagagtacnncctcatgtnncgagagatnntttttttttttttttttttttttttttttt

SEQ ID NO: 7801 - DNA, 84 bp, synthetic construct
  source 1..84: mol_type = other DNA
tttttttaagcagtggtatcaacgcagagtacnncctcatgtnnacagatggnntttttttttttttttttttttttttttttt

SEQ ID NO: 7802 - DNA, 84 bp, synthetic construct
  source 1..84: mol_type = other DNA
tttttttaagcagtggtatcaacgcagagtacnncctcatgtnnaggagtcanntttttttttttttttttttttttttttttt

SEQ ID NO: 7803 - DNA, 84 bp, synthetic construct
  source 1..84: mol_type = other DNA
tttttttaagcagtggtatcaacgcagagtacnncctcatgtnncgtgttacnntttttttttttttttttttttttttttttt

SEQ ID NO: 7804 - DNA, 84 bp, synthetic construct
  source 1..84: mol_type = other DNA
tttttttaagcagtggtatcaacgcagagtacnncctcatgtnntagtgtgcnntttttttttttttttttttttttttttttt

SEQ ID NO: 7805 - DNA, 84 bp, synthetic construct
  source 1..84: mol_type = other DNA
tttttttaagcagtggtatcaacgcagagtacnncctcatgtnnctcatgacnntttttttttttttttttttttttttttttt

SEQ ID NO: 7806 - DNA, 84 bp, synthetic construct
  source 1..84: mol_type = other DNA
tttttttaagcagtggtatcaacgcagagtacnncctcatgtnngtatccagnntttttttttttttttttttttttttttttt

SEQ ID NO: 7807 - DNA, 84 bp, synthetic construct
  source 1..84: mol_type = other DNA
tttttttaagcagtggtatcaacgcagagtacnncctcatgtnnacgcctatnntttttttttttttttttttttttttttttt

SEQ ID NO: 7808 - DNA, 84 bp, synthetic construct
  source 1..84: mol_type = other DNA
tttttttaagcagtggtatcaacgcagagtacnncctcatgtnnaacgacctnntttttttttttttttttttttttttttttt

SEQ ID NO: 7809 - DNA, 84 bp, synthetic construct
  source 1..84: mol_type = other DNA
tttttttaagcagtggtatcaacgcagagtacnncctcatgtnnatcaggctnntttttttttttttttttttttttttttttt

SEQ ID NO: 7810 - DNA, 84 bp, synthetic construct
  source 1..84: mol_type = other DNA
tttttttaagcagtggtatcaacgcagagtacnncctcatgtnncaagttcgnntttttttttttttttttttttttttttttt

SEQ ID NO: 7811 - DNA, 84 bp, synthetic construct
  source 1..84: mol_type = other DNA
tttttttaagcagtggtatcaacgcagagtacnncctcatgtnntagccaganntttttttttttttttttttttttttttttt

SEQ ID NO: 7812 - DNA, 84 bp, synthetic construct
  source 1..84: mol_type = other DNA
tttttttaagcagtggtatcaacgcagagtacnncctcatgtnncaatcacgnntttttttttttttttttttttttttttttt

SEQ ID NO: 7813 - DNA, 84 bp, synthetic construct
  source 1..84: mol_type = other DNA
tttttttaagcagtggtatcaacgcagagtacnncctcatgtnngcaacaagnntttttttttttttttttttttttttttttt

SEQ ID NO: 7814 - DNA, 84 bp, synthetic construct
  source 1..84: mol_type = other DNA
tttttttaagcagtggtatcaacgcagagtacnncctcatgtnncacgacaanntttttttttttttttttttttttttttttt

SEQ ID NO: 7815 - DNA, 84 bp, synthetic construct
  source 1..84: mol_type = other DNA
tttttttaagcagtggtatcaacgcagagtacnncctcatgtnntacggaganntttttttttttttttttttttttttttttt

SEQ ID NO: 7816 - DNA, 84 bp, synthetic construct
  source 1..84: mol_type = other DNA
tttttttaagcagtggtatcaacgcagagtacnncctcatgtnncgacaaganntttttttttttttttttttttttttttttt

SEQ ID NO: 7817 - DNA, 84 bp, synthetic construct
  source 1..84: mol_type = other DNA
tttttttaagcagtggtatcaacgcagagtacnncctcatgtnncgaagtganntttttttttttttttttttttttttttttt

SEQ ID NO: 7818 - DNA, 84 bp, synthetic construct
  source 1..84: mol_type = other DNA
tttttttaagcagtggtatcaacgcagagtacnncctcatgtnnagctggtanntttttttttttttttttttttttttttttt

SEQ ID NO: 7819 - DNA, 84 bp, synthetic construct
  source 1..84: mol_type = other DNA
tttttttaagcagtggtatcaacgcagagtacnncctcatgtnnaactaggcnntttttttttttttttttttttttttttttt

SEQ ID NO: 7820 - DNA, 84 bp, synthetic construct
  source 1..84: mol_type = other DNA
tttttttaagcagtggtatcaacgcagagtacnncctcatgtnncagcaagtnntttttttttttttttttttttttttttttt

SEQ ID NO: 7821 - DNA, 84 bp, synthetic construct
  source 1..84: mol_type = other DNA
tttttttaagcagtggtatcaacgcagagtacnncctcatgtnnacgaggtanntttttttttttttttttttttttttttttt

SEQ ID NO: 7822 - DNA, 84 bp, synthetic construct
  source 1..84: mol_type = other DNA
tttttttaagcagtggtatcaacgcagagtacnncctcatgtnncatcttccnntttttttttttttttttttttttttttttt

SEQ ID NO: 7823 - DNA, 84 bp, synthetic construct
  source 1..84: mol_type = other DNA
tttttttaagcagtggtatcaacgcagagtacnncctcatgtnncctgaatcnntttttttttttttttttttttttttttttt

SEQ ID NO: 7824 - DNA, 84 bp, synthetic construct
  source 1..84: mol_type = other DNA
tttttttaagcagtggtatcaacgcagagtacnncctcatgtnntgcagactnntttttttttttttttttttttttttttttt

SEQ ID NO: 7825 - DNA, 84 bp, synthetic construct
  source 1..84: mol_type = other DNA
tttttttaagcagtggtatcaacgcagagtacnncctcatgtnnagatgtggnntttttttttttttttttttttttttttttt

SEQ ID NO: 7826 - DNA, 84 bp, synthetic construct
  source 1..84: mol_type = other DNA
tttttttaagcagtggtatcaacgcagagtacnncctcatgtnnagttcgacnntttttttttttttttttttttttttttttt

SEQ ID NO: 7827 - DNA, 84 bp, synthetic construct
  source 1..84: mol_type = other DNA
tttttttaagcagtggtatcaacgcagagtacnncctcatgtnnacaacctcnntttttttttttttttttttttttttttttt

SEQ ID NO: 7828 - DNA, 84 bp, synthetic construct
  source 1..84: mol_type = other DNA
tttttttaagcagtggtatcaacgcagagtacnncctcatgtnncatggtagnntttttttttttttttttttttttttttttt

SEQ ID NO: 7829 - DNA, 84 bp, synthetic construct
  source 1..84: mol_type = other DNA
tttttttaagcagtggtatcaacgcagagtacnncctcatgtnncgtatctcnntttttttttttttttttttttttttttttt

SEQ ID NO: 7830 - DNA, 84 bp, synthetic construct
  source 1..84: mol_type = other DNA
tttttttaagcagtggtatcaacgcagagtacnncctcatgtnncctagttcnntttttttttttttttttttttttttttttt

SEQ ID NO: 7831 - DNA, 84 bp, synthetic construct
  source 1..84: mol_type = other DNA
tttttttaagcagtggtatcaacgcagagtacnncctcatgtnncaagagtcnntttttttttttttttttttttttttttttt

SEQ ID NO: 7832 - DNA, 84 bp, synthetic construct
  source 1..84: mol_type = other DNA
tttttttaagcagtggtatcaacgcagagtacnnggagtgttnnaatcggcanntttttttttttttttttttttttttttttt

SEQ ID NO: 7833 - DNA, 84 bp, synthetic construct
  source 1..84: mol_type = other DNA
tttttttaagcagtggtatcaacgcagagtacnnggagtgttnntacggcatnntttttttttttttttttttttttttttttt

SEQ ID NO: 7834 - DNA, 84 bp, synthetic construct
  source 1..84: mol_type = other DNA
tttttttaagcagtggtatcaacgcagagtacnnggagtgttnnttggatcgnntttttttttttttttttttttttttttttt

SEQ ID NO: 7835 - DNA, 84 bp, synthetic construct
  source 1..84: mol_type = other DNA
tttttttaagcagtggtatcaacgcagagtacnnggagtgttnntggaacganntttttttttttttttttttttttttttttt

SEQ ID NO: 7836 - DNA, 84 bp, synthetic construct
  source 1..84: mol_type = other DNA
tttttttaagcagtggtatcaacgcagagtacnnggagtgttnnggcaatcanntttttttttttttttttttttttttttttt

SEQ ID NO: 7837 - DNA, 84 bp, synthetic construct
  source 1..84: mol_type = other DNA
tttttttaagcagtggtatcaacgcagagtacnnggagtgttnngaatccganntttttttttttttttttttttttttttttt

SEQ ID NO: 7838 - DNA, 84 bp, synthetic construct
  source 1..84: mol_type = other DNA
tttttttaagcagtggtatcaacgcagagtacnnggagtgttnnttacggtgnntttttttttttttttttttttttttttttt

SEQ ID NO: 7839 - DNA, 84 bp, synthetic construct
  source 1..84: mol_type = other DNA
tttttttaagcagtggtatcaacgcagagtacnnggagtgttnncatatcggnntttttttttttttttttttttttttttttt

SEQ ID NO: 7840 - DNA, 84 bp, synthetic construct
  source 1..84: mol_type = other DNA
tttttttaagcagtggtatcaacgcagagtacnnggagtgttnncttcggtanntttttttttttttttttttttttttttttt

SEQ ID NO: 7841 - DNA, 84 bp, synthetic construct
  source 1..84: mol_type = other DNA
tttttttaagcagtggtatcaacgcagagtacnnggagtgttnntcctaacgnntttttttttttttttttttttttttttttt

SEQ ID NO: 7842 - DNA, 84 bp, synthetic construct
  source 1..84: mol_type = other DNA
tttttttaagcagtggtatcaacgcagagtacnnggagtgttnngtaagccanntttttttttttttttttttttttttttttt

SEQ ID NO: 7843 - DNA, 84 bp, synthetic construct
  source 1..84: mol_type = other DNA
tttttttaagcagtggtatcaacgcagagtacnnggagtgttnntaaggtggnntttttttttttttttttttttttttttttt

SEQ ID NO: 7844 - DNA, 84 bp, synthetic construct
  source 1..84: mol_type = other DNA
tttttttaagcagtggtatcaacgcagagtacnnggagtgttnnggtaagctnntttttttttttttttttttttttttttttt

SEQ ID NO: 7845 - DNA, 84 bp, synthetic construct
  source 1..84: mol_type = other DNA
tttttttaagcagtggtatcaacgcagagtacnnggagtgttnntgtgtcganntttttttttttttttttttttttttttttt

SEQ ID NO: 7846 - DNA, 84 bp, synthetic construct
  source 1..84: mol_type = other DNA
tttttttaagcagtggtatcaacgcagagtacnnggagtgttnngagcatganntttttttttttttttttttttttttttttt

SEQ ID NO: 7847 - DNA, 84 bp, synthetic construct
  source 1..84: mol_type = other DNA
tttttttaagcagtggtatcaacgcagagtacnnggagtgttnntcgaagtcnntttttttttttttttttttttttttttttt

SEQ ID NO: 7848 - DNA, 84 bp, synthetic construct
  source 1..84: mol_type = other DNA
tttttttaagcagtggtatcaacgcagagtacnnggagtgttnnggtgaacanntttttttttttttttttttttttttttttt

SEQ ID NO: 7849 - DNA, 84 bp, synthetic construct
  source 1..84: mol_type = other DNA
tttttttaagcagtggtatcaacgcagagtacnnggagtgttnnacatgcacnntttttttttttttttttttttttttttttt

SEQ ID NO: 7850 - DNA, 84 bp, synthetic construct
  source 1..84: mol_type = other DNA
tttttttaagcagtggtatcaacgcagagtacnnggagtgttnnccaacagtnntttttttttttttttttttttttttttttt

SEQ ID NO: 7851 - DNA, 84 bp, synthetic construct
  source 1..84: mol_type = other DNA
tttttttaagcagtggtatcaacgcagagtacnnggagtgttnnagaacagcnntttttttttttttttttttttttttttttt

SEQ ID NO: 7852 - DNA, 84 bp, synthetic construct
  source 1..84: mol_type = other DNA
tttttttaagcagtggtatcaacgcagagtacnnggagtgttnngaacacgtnntttttttttttttttttttttttttttttt

SEQ ID NO: 7853 - DNA, 84 bp, synthetic construct
  source 1..84: mol_type = other DNA
tttttttaagcagtggtatcaacgcagagtacnnggagtgttnnggtcttcanntttttttttttttttttttttttttttttt

SEQ ID NO: 7854 - DNA, 84 bp, synthetic construct
  source 1..84: mol_type = other DNA
tttttttaagcagtggtatcaacgcagagtacnnggagtgttnnaggttcagnntttttttttttttttttttttttttttttt

SEQ ID NO: 7855 - DNA, 84 bp, synthetic construct
  source 1..84: mol_type = other DNA
tttttttaagcagtggtatcaacgcagagtacnnggagtgttnnctagagcanntttttttttttttttttttttttttttttt

SEQ ID NO: 7856 - DNA, 84 bp, synthetic construct
  source 1..84: mol_type = other DNA
tttttttaagcagtggtatcaacgcagagtacnnggagtgttnncttctagcnntttttttttttttttttttttttttttttt

SEQ ID NO: 7857 - DNA, 84 bp, synthetic construct
  source 1..84: mol_type = other DNA
tttttttaagcagtggtatcaacgcagagtacnnggagtgttnngagtaacgnntttttttttttttttttttttttttttttt

SEQ ID NO: 7858 - DNA, 84 bp, synthetic construct
  source 1..84: mol_type = other DNA
tttttttaagcagtggtatcaacgcagagtacnnggagtgttnnctaagaggnntttttttttttttttttttttttttttttt

SEQ ID NO: 7859 - DNA, 84 bp, synthetic construct
  source 1..84: mol_type = other DNA
tttttttaagcagtggtatcaacgcagagtacnnggagtgttnnacgtgtagnntttttttttttttttttttttttttttttt

SEQ ID NO: 7860 - DNA, 84 bp, synthetic construct
  source 1..84: mol_type = other DNA
tttttttaagcagtggtatcaacgcagagtacnnggagtgttnnactacaggnntttttttttttttttttttttttttttttt

SEQ ID NO: 7861 - DNA, 84 bp, synthetic construct
  source 1..84: mol_type = other DNA
tttttttaagcagtggtatcaacgcagagtacnnggagtgttnntacaggtcnntttttttttttttttttttttttttttttt

SEQ ID NO: 7862 - DNA, 84 bp, synthetic construct
  source 1..84: mol_type = other DNA
tttttttaagcagtggtatcaacgcagagtacnnggagtgttnnctcacatgnntttttttttttttttttttttttttttttt

SEQ ID NO: 7863 - DNA, 84 bp, synthetic construct
  source 1..84: mol_type = other DNA
tttttttaagcagtggtatcaacgcagagtacnnggagtgttnnactaggagnntttttttttttttttttttttttttttttt

SEQ ID NO: 7864 - DNA, 84 bp, synthetic construct
  source 1..84: mol_type = other DNA
tttttttaagcagtggtatcaacgcagagtacnnggagtgttnnccatagganntttttttttttttttttttttttttttttt

SEQ ID NO: 7865 - DNA, 84 bp, synthetic construct
  source 1..84: mol_type = other DNA
tttttttaagcagtggtatcaacgcagagtacnnggagtgttnnggagaatcnntttttttttttttttttttttttttttttt

SEQ ID NO: 7866 - DNA, 84 bp, synthetic construct
  source 1..84: mol_type = other DNA
tttttttaagcagtggtatcaacgcagagtacnnggagtgttnngccaagaanntttttttttttttttttttttttttttttt

SEQ ID NO: 7867 - DNA, 84 bp, synthetic construct
  source 1..84: mol_type = other DNA
tttttttaagcagtggtatcaacgcagagtacnnggagtgttnnaaggcaagnntttttttttttttttttttttttttttttt

SEQ ID NO: 7868 - DNA, 84 bp, synthetic construct
  source 1..84: mol_type = other DNA
tttttttaagcagtggtatcaacgcagagtacnnggagtgttnnaatgtcgcnntttttttttttttttttttttttttttttt

SEQ ID NO: 7869 - DNA, 84 bp, synthetic construct
  source 1..84: mol_type = other DNA
tttttttaagcagtggtatcaacgcagagtacnnggagtgttnnatggaaccnntttttttttttttttttttttttttttttt

SEQ ID NO: 7870 - DNA, 84 bp, synthetic construct
  source 1..84: mol_type = other DNA
tttttttaagcagtggtatcaacgcagagtacnnggagtgttnnagaggcatnntttttttttttttttttttttttttttttt

SEQ ID NO: 7871 - DNA, 84 bp, synthetic construct
  source 1..84: mol_type = other DNA
tttttttaagcagtggtatcaacgcagagtacnnggagtgttnntgcatagcnntttttttttttttttttttttttttttttt

SEQ ID NO: 7872 - DNA, 84 bp, synthetic construct
  source 1..84: mol_type = other DNA
tttttttaagcagtggtatcaacgcagagtacnnggagtgttnnctaacgganntttttttttttttttttttttttttttttt

SEQ ID NO: 7873 - DNA, 84 bp, synthetic construct
  source 1..84: mol_type = other DNA
tttttttaagcagtggtatcaacgcagagtacnnggagtgttnntatcgaggnntttttttttttttttttttttttttttttt

SEQ ID NO: 7874 - DNA, 84 bp, synthetic construct
  source 1..84: mol_type = other DNA
tttttttaagcagtggtatcaacgcagagtacnnggagtgttnncatagcctnntttttttttttttttttttttttttttttt

SEQ ID NO: 7875 - DNA, 84 bp, synthetic construct
  source 1..84: mol_type = other DNA
tttttttaagcagtggtatcaacgcagagtacnnggagtgttnnatcgagacnntttttttttttttttttttttttttttttt

SEQ ID NO: 7876 - DNA, 84 bp, synthetic construct
  source 1..84: mol_type = other DNA
tttttttaagcagtggtatcaacgcagagtacnnggagtgttnnggaagagtnntttttttttttttttttttttttttttttt

SEQ ID NO: 7877 - DNA, 84 bp, synthetic construct
  source 1..84: mol_type = other DNA
tttttttaagcagtggtatcaacgcagagtacnnggagtgttnnccaagtagnntttttttttttttttttttttttttttttt

SEQ ID NO: 7878 - DNA, 84 bp, synthetic construct
  source 1..84: mol_type = other DNA
tttttttaagcagtggtatcaacgcagagtacnnggagtgttnnctgaacagnntttttttttttttttttttttttttttttt

SEQ ID NO: 7879 - DNA, 84 bp, synthetic construct
  source 1..84: mol_type = other DNA
tttttttaagcagtggtatcaacgcagagtacnnggagtgttnngtaggttcnntttttttttttttttttttttttttttttt

SEQ ID NO: 7880 - DNA, 84 bp, synthetic construct
  source 1..84: mol_type = other DNA
tttttttaagcagtggtatcaacgcagagtacnnggagtgttnngtatggacnntttttttttttttttttttttttttttttt

SEQ ID NO: 7881 - DNA, 84 bp, synthetic construct
  source 1..84: mol_type = other DNA
tttttttaagcagtggtatcaacgcagagtacnnggagtgttnntcgcaacanntttttttttttttttttttttttttttttt

SEQ ID NO: 7882 - DNA, 84 bp, synthetic construct
  source 1..84: mol_type = other DNA
tttttttaagcagtggtatcaacgcagagtacnnggagtgttnnccgctaatnntttttttttttttttttttttttttttttt

SEQ ID NO: 7883 - DNA, 84 bp, synthetic construct
  source 1..84: mol_type = other DNA
tttttttaagcagtggtatcaacgcagagtacnnggagtgttnngattcgcanntttttttttttttttttttttttttttttt

SEQ ID NO: 7884 - DNA, 84 bp, synthetic construct
  source 1..84: mol_type = other DNA
tttttttaagcagtggtatcaacgcagagtacnnggagtgttnncgatggaanntttttttttttttttttttttttttttttt

SEQ ID NO: 7885 - DNA, 84 bp, synthetic construct
  source 1..84: mol_type = other DNA
tttttttaagcagtggtatcaacgcagagtacnnggagtgttnnagcaagganntttttttttttttttttttttttttttttt

SEQ ID NO: 7886 - DNA, 84 bp, synthetic construct
  source 1..84: mol_type = other DNA
tttttttaagcagtggtatcaacgcagagtacnnggagtgttnncgtagcaanntttttttttttttttttttttttttttttt

SEQ ID NO: 7887 - DNA, 84 bp, synthetic construct
  source 1..84: mol_type = other DNA
tttttttaagcagtggtatcaacgcagagtacnnggagtgttnntggcagtanntttttttttttttttttttttttttttttt

SEQ ID NO: 7888 - DNA, 84 bp, synthetic construct
  source 1..84: mol_type = other DNA
tttttttaagcagtggtatcaacgcagagtacnnggagtgttnncggtagttnntttttttttttttttttttttttttttttt

SEQ ID NO: 7889 - DNA, 84 bp, synthetic construct
  source 1..84: mol_type = other DNA
tttttttaagcagtggtatcaacgcagagtacnnggagtgttnntgacttcgnntttttttttttttttttttttttttttttt

SEQ ID NO: 7890 - DNA, 84 bp, synthetic construct
  source 1..84: mol_type = other DNA
tttttttaagcagtggtatcaacgcagagtacnnggagtgttnngagtgcaanntttttttttttttttttttttttttttttt

SEQ ID NO: 7891 - DNA, 84 bp, synthetic construct
  source 1..84: mol_type = other DNA
tttttttaagcagtggtatcaacgcagagtacnnggagtgttnnacggtaacnntttttttttttttttttttttttttttttt

SEQ ID NO: 7892 - DNA, 84 bp, synthetic construct
  source 1..84: mol_type = other DNA
tttttttaagcagtggtatcaacgcagagtacnnggagtgttnnaagtggtgnntttttttttttttttttttttttttttttt

SEQ ID NO: 7893 - DNA, 84 bp, synthetic construct
  source 1..84: mol_type = other DNA
tttttttaagcagtggtatcaacgcagagtacnnggagtgttnnggagacaanntttttttttttttttttttttttttttttt

SEQ ID NO: 7894 - DNA, 84 bp, synthetic construct
  source 1..84: mol_type = other DNA
tttttttaagcagtggtatcaacgcagagtacnnggagtgttnntcaaggacnntttttttttttttttttttttttttttttt

SEQ ID NO: 7895 - DNA, 84 bp, synthetic construct
  source 1..84: mol_type = other DNA
tttttttaagcagtggtatcaacgcagagtacnnggagtgttnnaagagagcnntttttttttttttttttttttttttttttt

SEQ ID NO: 7896 - DNA, 84 bp, synthetic construct
  source 1..84: mol_type = other DNA
tttttttaagcagtggtatcaacgcagagtacnnggagtgttnncgagagatnntttttttttttttttttttttttttttttt

SEQ ID NO: 7897 - DNA, 84 bp, synthetic construct
  source 1..84: mol_type = other DNA
tttttttaagcagtggtatcaacgcagagtacnnggagtgttnnacagatggnntttttttttttttttttttttttttttttt

SEQ ID NO: 7898 - DNA, 84 bp, synthetic construct
  source 1..84: mol_type = other DNA
tttttttaagcagtggtatcaacgcagagtacnnggagtgttnnaggagtcanntttttttttttttttttttttttttttttt

SEQ ID NO: 7899 - DNA, 84 bp, synthetic construct
  source 1..84: mol_type = other DNA
tttttttaagcagtggtatcaacgcagagtacnnggagtgttnncgtgttacnntttttttttttttttttttttttttttttt

SEQ ID NO: 7900 - DNA, 84 bp, synthetic construct
  source 1..84: mol_type = other DNA
tttttttaagcagtggtatcaacgcagagtacnnggagtgttnntagtgtgcnntttttttttttttttttttttttttttttt

SEQ ID NO: 7901 - DNA, 84 bp, synthetic construct
  source 1..84: mol_type = other DNA
tttttttaagcagtggtatcaacgcagagtacnnggagtgttnnctcatgacnntttttttttttttttttttttttttttttt

SEQ ID NO: 7902 - DNA, 84 bp, synthetic construct
  source 1..84: mol_type = other DNA
tttttttaagcagtggtatcaacgcagagtacnnggagtgttnngtatccagnntttttttttttttttttttttttttttttt

SEQ ID NO: 7903 - DNA, 84 bp, synthetic construct
  source 1..84: mol_type = other DNA
tttttttaagcagtggtatcaacgcagagtacnnggagtgttnnacgcctatnntttttttttttttttttttttttttttttt

SEQ ID NO: 7904 - DNA, 84 bp, synthetic construct
  source 1..84: mol_type = other DNA
tttttttaagcagtggtatcaacgcagagtacnnggagtgttnnaacgacctnntttttttttttttttttttttttttttttt

SEQ ID NO: 7905 - DNA, 84 bp, synthetic construct
  source 1..84: mol_type = other DNA
tttttttaagcagtggtatcaacgcagagtacnnggagtgttnnatcaggctnntttttttttttttttttttttttttttttt

SEQ ID NO: 7906 - DNA, 84 bp, synthetic construct
  source 1..84: mol_type = other DNA
tttttttaagcagtggtatcaacgcagagtacnnggagtgttnncaagttcgnntttttttttttttttttttttttttttttt

SEQ ID NO: 7907 - DNA, 84 bp, synthetic construct
  source 1..84: mol_type = other DNA
tttttttaagcagtggtatcaacgcagagtacnnggagtgttnntagccaganntttttttttttttttttttttttttttttt

SEQ ID NO: 7908 - DNA, 84 bp, synthetic construct
  source 1..84: mol_type = other DNA
tttttttaagcagtggtatcaacgcagagtacnnggagtgttnncaatcacgnntttttttttttttttttttttttttttttt

SEQ ID NO: 7909 - DNA, 84 bp, synthetic construct
  source 1..84: mol_type = other DNA
tttttttaagcagtggtatcaacgcagagtacnnggagtgttnngcaacaagnntttttttttttttttttttttttttttttt

SEQ ID NO: 7910 - DNA, 84 bp, synthetic construct
  source 1..84: mol_type = other DNA
tttttttaagcagtggtatcaacgcagagtacnnggagtgttnncacgacaanntttttttttttttttttttttttttttttt

SEQ ID NO: 7911 - DNA, 84 bp, synthetic construct
  source 1..84: mol_type = other DNA
tttttttaagcagtggtatcaacgcagagtacnnggagtgttnntacggaganntttttttttttttttttttttttttttttt

SEQ ID NO: 7912 - DNA, 84 bp, synthetic construct
  source 1..84: mol_type = other DNA
tttttttaagcagtggtatcaacgcagagtacnnggagtgttnncgacaaganntttttttttttttttttttttttttttttt

SEQ ID NO: 7913 - DNA, 84 bp, synthetic construct
  source 1..84: mol_type = other DNA
tttttttaagcagtggtatcaacgcagagtacnnggagtgttnncgaagtganntttttttttttttttttttttttttttttt

SEQ ID NO: 7914 - DNA, 84 bp, synthetic construct
  source 1..84: mol_type = other DNA
tttttttaagcagtggtatcaacgcagagtacnnggagtgttnnagctggtanntttttttttttttttttttttttttttttt

SEQ ID NO: 7915 - DNA, 84 bp, synthetic construct
  source 1..84: mol_type = other DNA
tttttttaagcagtggtatcaacgcagagtacnnggagtgttnnaactaggcnntttttttttttttttttttttttttttttt

SEQ ID NO: 7916 - DNA, 84 bp, synthetic construct
  source 1..84: mol_type = other DNA
tttttttaagcagtggtatcaacgcagagtacnnggagtgttnncagcaagtnntttttttttttttttttttttttttttttt

SEQ ID NO: 7917 - DNA, 84 bp, synthetic construct
  source 1..84: mol_type = other DNA
tttttttaagcagtggtatcaacgcagagtacnnggagtgttnnacgaggtanntttttttttttttttttttttttttttttt

SEQ ID NO: 7918 - DNA, 84 bp, synthetic construct
  source 1..84: mol_type = other DNA
tttttttaagcagtggtatcaacgcagagtacnnggagtgttnncatcttccnntttttttttttttttttttttttttttttt

SEQ ID NO: 7919 - DNA, 84 bp, synthetic construct
  source 1..84: mol_type = other DNA
tttttttaagcagtggtatcaacgcagagtacnnggagtgttnncctgaatcnntttttttttttttttttttttttttttttt

SEQ ID NO: 7920 - DNA, 84 bp, synthetic construct
  source 1..84: mol_type = other DNA
tttttttaagcagtggtatcaacgcagagtacnnggagtgttnntgcagactnntttttttttttttttttttttttttttttt

SEQ ID NO: 7921 - DNA, 84 bp, synthetic construct
  source 1..84: mol_type = other DNA
tttttttaagcagtggtatcaacgcagagtacnnggagtgttnnagatgtggnntttttttttttttttttttttttttttttt

SEQ ID NO: 7922 - DNA, 84 bp, synthetic construct
  source 1..84: mol_type = other DNA
tttttttaagcagtggtatcaacgcagagtacnnggagtgttnnagttcgacnntttttttttttttttttttttttttttttt

SEQ ID NO: 7923 - DNA, 84 bp, synthetic construct
  source 1..84: mol_type = other DNA
tttttttaagcagtggtatcaacgcagagtacnnggagtgttnnacaacctcnntttttttttttttttttttttttttttttt

SEQ ID NO: 7924 - DNA, 84 bp, synthetic construct
  source 1..84: mol_type = other DNA
tttttttaagcagtggtatcaacgcagagtacnnggagtgttnncatggtagnntttttttttttttttttttttttttttttt

SEQ ID NO: 7925 - DNA, 84 bp, synthetic construct
  source 1..84: mol_type = other DNA
tttttttaagcagtggtatcaacgcagagtacnnggagtgttnncgtatctcnntttttttttttttttttttttttttttttt

SEQ ID NO: 7926 - DNA, 84 bp, synthetic construct
  source 1..84: mol_type = other DNA
tttttttaagcagtggtatcaacgcagagtacnnggagtgttnncctagttcnntttttttttttttttttttttttttttttt

SEQ ID NO: 7927 - DNA, 84 bp, synthetic construct
  source 1..84: mol_type = other DNA
tttttttaagcagtggtatcaacgcagagtacnnggagtgttnncaagagtcnntttttttttttttttttttttttttttttt

SEQ ID NO: 7928 - DNA, 84 bp, synthetic construct
  source 1..84: mol_type = other DNA
tttttttaagcagtggtatcaacgcagagtacnngaagatccnnaatcggcanntttttttttttttttttttttttttttttt

SEQ ID NO: 7929 - DNA, 84 bp, synthetic construct
  source 1..84: mol_type = other DNA
tttttttaagcagtggtatcaacgcagagtacnngaagatccnntacggcatnntttttttttttttttttttttttttttttt

SEQ ID NO: 7930 - DNA, 84 bp, synthetic construct
  source 1..84: mol_type = other DNA
tttttttaagcagtggtatcaacgcagagtacnngaagatccnnttggatcgnntttttttttttttttttttttttttttttt

SEQ ID NO: 7931 - DNA, 84 bp, synthetic construct
  source 1..84: mol_type = other DNA
tttttttaagcagtggtatcaacgcagagtacnngaagatccnntggaacganntttttttttttttttttttttttttttttt

SEQ ID NO: 7932 - DNA, 84 bp, synthetic construct
  source 1..84: mol_type = other DNA
tttttttaagcagtggtatcaacgcagagtacnngaagatccnnggcaatcanntttttttttttttttttttttttttttttt

SEQ ID NO: 7933 - DNA, 84 bp, synthetic construct
  source 1..84: mol_type = other DNA
tttttttaagcagtggtatcaacgcagagtacnngaagatccnngaatccganntttttttttttttttttttttttttttttt

SEQ ID NO: 7934 - DNA, 84 bp, synthetic construct
  source 1..84: mol_type = other DNA
tttttttaagcagtggtatcaacgcagagtacnngaagatccnnttacggtgnntttttttttttttttttttttttttttttt

SEQ ID NO: 7935 - DNA, 84 bp, synthetic construct
  source 1..84: mol_type = other DNA
tttttttaagcagtggtatcaacgcagagtacnngaagatccnncatatcggnntttttttttttttttttttttttttttttt

SEQ ID NO: 7936 - DNA, 84 bp, synthetic construct
  source 1..84: mol_type = other DNA
tttttttaagcagtggtatcaacgcagagtacnngaagatccnncttcggtanntttttttttttttttttttttttttttttt

SEQ ID NO: 7937 - DNA, 84 bp, synthetic construct
  source 1..84: mol_type = other DNA
tttttttaagcagtggtatcaacgcagagtacnngaagatccnntcctaacgnntttttttttttttttttttttttttttttt

SEQ ID NO: 7938 - DNA, 84 bp, synthetic construct
  source 1..84: mol_type = other DNA
tttttttaagcagtggtatcaacgcagagtacnngaagatccnngtaagccanntttttttttttttttttttttttttttttt

SEQ ID NO: 7939 - DNA, 84 bp, synthetic construct
  source 1..84: mol_type = other DNA
tttttttaagcagtggtatcaacgcagagtacnngaagatccnntaaggtggnntttttttttttttttttttttttttttttt

SEQ ID NO: 7940 - DNA, 84 bp, synthetic construct
  source 1..84: mol_type = other DNA
tttttttaagcagtggtatcaacgcagagtacnngaagatccnnggtaagctnntttttttttttttttttttttttttttttt

SEQ ID NO: 7941 - DNA, 84 bp, synthetic construct
  source 1..84: mol_type = other DNA
tttttttaagcagtggtatcaacgcagagtacnngaagatccnntgtgtcganntttttttttttttttttttttttttttttt

SEQ ID NO: 7942 - DNA, 84 bp, synthetic construct
  source 1..84: mol_type = other DNA
tttttttaagcagtggtatcaacgcagagtacnngaagatccnngagcatganntttttttttttttttttttttttttttttt

SEQ ID NO: 7943 - DNA, 84 bp, synthetic construct
  source 1..84: mol_type = other DNA
tttttttaagcagtggtatcaacgcagagtacnngaagatccnntcgaagtcnntttttttttttttttttttttttttttttt

SEQ ID NO: 7944 - DNA, 84 bp, synthetic construct
  source 1..84: mol_type = other DNA
tttttttaagcagtggtatcaacgcagagtacnngaagatccnnggtgaacanntttttttttttttttttttttttttttttt

SEQ ID NO: 7945 - DNA, 84 bp, synthetic construct
  source 1..84: mol_type = other DNA
tttttttaagcagtggtatcaacgcagagtacnngaagatccnnacatgcacnntttttttttttttttttttttttttttttt

SEQ ID NO: 7946 - DNA, 84 bp, synthetic construct
  source 1..84: mol_type = other DNA
tttttttaagcagtggtatcaacgcagagtacnngaagatccnnccaacagtnntttttttttttttttttttttttttttttt

SEQ ID NO: 7947 - DNA, 84 bp, synthetic construct
  source 1..84: mol_type = other DNA
tttttttaagcagtggtatcaacgcagagtacnngaagatccnnagaacagcnntttttttttttttttttttttttttttttt

SEQ ID NO: 7948 - DNA, 84 bp, synthetic construct
  source 1..84: mol_type = other DNA
tttttttaagcagtggtatcaacgcagagtacnngaagatccnngaacacgtnntttttttttttttttttttttttttttttt

SEQ ID NO: 7949 - DNA, 84 bp, synthetic construct
  source 1..84: mol_type = other DNA
tttttttaagcagtggtatcaacgcagagtacnngaagatccnnggtcttcanntttttttttttttttttttttttttttttt

SEQ ID NO: 7950 - DNA, 84 bp, synthetic construct
  source 1..84: mol_type = other DNA
tttttttaagcagtggtatcaacgcagagtacnngaagatccnnaggttcagnntttttttttttttttttttttttttttttt

SEQ ID NO: 7951 - DNA, 84 bp, synthetic construct
  source 1..84: mol_type = other DNA
tttttttaagcagtggtatcaacgcagagtacnngaagatccnnctagagcanntttttttttttttttttttttttttttttt

SEQ ID NO: 7952 - DNA, 84 bp, synthetic construct
  source 1..84: mol_type = other DNA
tttttttaagcagtggtatcaacgcagagtacnngaagatccnncttctagcnntttttttttttttttttttttttttttttt

SEQ ID NO: 7953 - DNA, 84 bp, synthetic construct
  source 1..84: mol_type = other DNA
tttttttaagcagtggtatcaacgcagagtacnngaagatccnngagtaacgnntttttttttttttttttttttttttttttt

SEQ ID NO: 7954 - DNA, 84 bp, synthetic construct
  source 1..84: mol_type = other DNA
tttttttaagcagtggtatcaacgcagagtacnngaagatccnnctaagaggnntttttttttttttttttttttttttttttt

SEQ ID NO: 7955 - DNA, 84 bp, synthetic construct
  source 1..84: mol_type = other DNA
tttttttaagcagtggtatcaacgcagagtacnngaagatccnnacgtgtagnntttttttttttttttttttttttttttttt

SEQ ID NO: 7956 - DNA, 84 bp, synthetic construct
  source 1..84: mol_type = other DNA
tttttttaagcagtggtatcaacgcagagtacnngaagatccnnactacaggnntttttttttttttttttttttttttttttt

SEQ ID NO: 7957 - DNA, 84 bp, synthetic construct
  source 1..84: mol_type = other DNA
tttttttaagcagtggtatcaacgcagagtacnngaagatccnntacaggtcnntttttttttttttttttttttttttttttt

SEQ ID NO: 7958 - DNA, 84 bp, synthetic construct
  source 1..84: mol_type = other DNA
tttttttaagcagtggtatcaacgcagagtacnngaagatccnnctcacatgnntttttttttttttttttttttttttttttt

SEQ ID NO: 7959 - DNA, 84 bp, synthetic construct
  source 1..84: mol_type = other DNA
tttttttaagcagtggtatcaacgcagagtacnngaagatccnnactaggagnntttttttttttttttttttttttttttttt

SEQ ID NO: 7960 - DNA, 84 bp, synthetic construct
  source 1..84: mol_type = other DNA
tttttttaagcagtggtatcaacgcagagtacnngaagatccnnccatagganntttttttttttttttttttttttttttttt

SEQ ID NO: 7961 - DNA, 84 bp, synthetic construct
  source 1..84: mol_type = other DNA
tttttttaagcagtggtatcaacgcagagtacnngaagatccnnggagaatcnntttttttttttttttttttttttttttttt

SEQ ID NO: 7962 - DNA, 84 bp, synthetic construct
  source 1..84: mol_type = other DNA
tttttttaagcagtggtatcaacgcagagtacnngaagatccnngccaagaanntttttttttttttttttttttttttttttt

SEQ ID NO: 7963 - DNA, 84 bp, synthetic construct
  source 1..84: mol_type = other DNA
tttttttaagcagtggtatcaacgcagagtacnngaagatccnnaaggcaagnntttttttttttttttttttttttttttttt

SEQ ID NO: 7964 - DNA, 84 bp, synthetic construct
  source 1..84: mol_type = other DNA
tttttttaagcagtggtatcaacgcagagtacnngaagatccnnaatgtcgcnntttttttttttttttttttttttttttttt

SEQ ID NO: 7965 - DNA, 84 bp, synthetic construct
  source 1..84: mol_type = other DNA
tttttttaagcagtggtatcaacgcagagtacnngaagatccnnatggaaccnntttttttttttttttttttttttttttttt

SEQ ID NO: 7966 - DNA, 84 bp, synthetic construct
  source 1..84: mol_type = other DNA
tttttttaagcagtggtatcaacgcagagtacnngaagatccnnagaggcatnntttttttttttttttttttttttttttttt

SEQ ID NO: 7967 - DNA, 84 bp, synthetic construct
  source 1..84: mol_type = other DNA
tttttttaagcagtggtatcaacgcagagtacnngaagatccnntgcatagcnntttttttttttttttttttttttttttttt

SEQ ID NO: 7968 - DNA, 84 bp, synthetic construct
  source 1..84: mol_type = other DNA
tttttttaagcagtggtatcaacgcagagtacnngaagatccnnctaacgganntttttttttttttttttttttttttttttt

SEQ ID NO: 7969 - DNA, 84 bp, synthetic construct
  source 1..84: mol_type = other DNA
tttttttaagcagtggtatcaacgcagagtacnngaagatccnntatcgaggnntttttttttttttttttttttttttttttt

SEQ ID NO: 7970 - DNA, 84 bp, synthetic construct
  source 1..84: mol_type = other DNA
tttttttaagcagtggtatcaacgcagagtacnngaagatccnncatagcctnntttttttttttttttttttttttttttttt

SEQ ID NO: 7971 - DNA, 84 bp, synthetic construct
  source 1..84: mol_type = other DNA
tttttttaagcagtggtatcaacgcagagtacnngaagatccnnatcgagacnntttttttttttttttttttttttttttttt

SEQ ID NO: 7972 - DNA, 84 bp, synthetic construct
  source 1..84: mol_type = other DNA
tttttttaagcagtggtatcaacgcagagtacnngaagatccnnggaagagtnntttttttttttttttttttttttttttttt

SEQ ID NO: 7973 - DNA, 84 bp, synthetic construct
  source 1..84: mol_type = other DNA
tttttttaagcagtggtatcaacgcagagtacnngaagatccnnccaagtagnntttttttttttttttttttttttttttttt

SEQ ID NO: 7974 - DNA, 84 bp, synthetic construct
  source 1..84: mol_type = other DNA
tttttttaagcagtggtatcaacgcagagtacnngaagatccnnctgaacagnntttttttttttttttttttttttttttttt

SEQ ID NO: 7975 - DNA, 84 bp, synthetic construct
  source 1..84: mol_type = other DNA
tttttttaagcagtggtatcaacgcagagtacnngaagatccnngtaggttcnntttttttttttttttttttttttttttttt

SEQ ID NO: 7976 - DNA, 84 bp, synthetic construct
  source 1..84: mol_type = other DNA
tttttttaagcagtggtatcaacgcagagtacnngaagatccnngtatggacnntttttttttttttttttttttttttttttt

SEQ ID NO: 7977 - DNA, 84 bp, synthetic construct
  source 1..84: mol_type = other DNA
tttttttaagcagtggtatcaacgcagagtacnngaagatccnntcgcaacanntttttttttttttttttttttttttttttt

SEQ ID NO: 7978 - DNA, 84 bp, synthetic construct
  source 1..84: mol_type = other DNA
tttttttaagcagtggtatcaacgcagagtacnngaagatccnnccgctaatnntttttttttttttttttttttttttttttt

SEQ ID NO: 7979 - DNA, 84 bp, synthetic construct
  source 1..84: mol_type = other DNA
tttttttaagcagtggtatcaacgcagagtacnngaagatccnngattcgcanntttttttttttttttttttttttttttttt

SEQ ID NO: 7980 - DNA, 84 bp, synthetic construct
  source 1..84: mol_type = other DNA
tttttttaagcagtggtatcaacgcagagtacnngaagatccnncgatggaanntttttttttttttttttttttttttttttt

SEQ ID NO: 7981 - DNA, 84 bp, synthetic construct
  source 1..84: mol_type = other DNA
tttttttaagcagtggtatcaacgcagagtacnngaagatccnnagcaagganntttttttttttttttttttttttttttttt

SEQ ID NO: 7982 - DNA, 84 bp, synthetic construct
  source 1..84: mol_type = other DNA
tttttttaagcagtggtatcaacgcagagtacnngaagatccnncgtagcaanntttttttttttttttttttttttttttttt

SEQ ID NO: 7983 - DNA, 84 bp, synthetic construct
  source 1..84: mol_type = other DNA
tttttttaagcagtggtatcaacgcagagtacnngaagatccnntggcagtanntttttttttttttttttttttttttttttt

SEQ ID NO: 7984 - DNA, 84 bp, synthetic construct
  source 1..84: mol_type = other DNA
tttttttaagcagtggtatcaacgcagagtacnngaagatccnncggtagttnntttttttttttttttttttttttttttttt

SEQ ID NO: 7985 - DNA, 84 bp, synthetic construct
  source 1..84: mol_type = other DNA
tttttttaagcagtggtatcaacgcagagtacnngaagatccnntgacttcgnntttttttttttttttttttttttttttttt

SEQ ID NO: 7986 - DNA, 84 bp, synthetic construct
  source 1..84: mol_type = other DNA
tttttttaagcagtggtatcaacgcagagtacnngaagatccnngagtgcaanntttttttttttttttttttttttttttttt

SEQ ID NO: 7987 - DNA, 84 bp, synthetic construct
  source 1..84: mol_type = other DNA
tttttttaagcagtggtatcaacgcagagtacnngaagatccnnacggtaacnntttttttttttttttttttttttttttttt

SEQ ID NO: 7988 - DNA, 84 bp, synthetic construct
  source 1..84: mol_type = other DNA
tttttttaagcagtggtatcaacgcagagtacnngaagatccnnaagtggtgnntttttttttttttttttttttttttttttt

SEQ ID NO: 7989 - DNA, 84 bp, synthetic construct
  source 1..84: mol_type = other DNA
tttttttaagcagtggtatcaacgcagagtacnngaagatccnnggagacaanntttttttttttttttttttttttttttttt

SEQ ID NO: 7990 - DNA, 84 bp, synthetic construct
  source 1..84: mol_type = other DNA
tttttttaagcagtggtatcaacgcagagtacnngaagatccnntcaaggacnntttttttttttttttttttttttttttttt

SEQ ID NO: 7991 - DNA, 84 bp, synthetic construct
  source 1..84: mol_type = other DNA
tttttttaagcagtggtatcaacgcagagtacnngaagatccnnaagagagcnntttttttttttttttttttttttttttttt

SEQ ID NO: 7992 - DNA, 84 bp, synthetic construct
  source 1..84: mol_type = other DNA
tttttttaagcagtggtatcaacgcagagtacnngaagatccnncgagagatnntttttttttttttttttttttttttttttt

SEQ ID NO: 7993 - DNA, 84 bp, synthetic construct
  source 1..84: mol_type = other DNA
tttttttaagcagtggtatcaacgcagagtacnngaagatccnnacagatggnntttttttttttttttttttttttttttttt

SEQ ID NO: 7994 - DNA, 84 bp, synthetic construct
  source 1..84: mol_type = other DNA
tttttttaagcagtggtatcaacgcagagtacnngaagatccnnaggagtcanntttttttttttttttttttttttttttttt

SEQ ID NO: 7995 - DNA, 84 bp, synthetic construct
  source 1..84: mol_type = other DNA
tttttttaagcagtggtatcaacgcagagtacnngaagatccnncgtgttacnntttttttttttttttttttttttttttttt

SEQ ID NO: 7996 - DNA, 84 bp, synthetic construct
  source 1..84: mol_type = other DNA
tttttttaagcagtggtatcaacgcagagtacnngaagatccnntagtgtgcnntttttttttttttttttttttttttttttt

SEQ ID NO: 7997 - DNA, 84 bp, synthetic construct
  source 1..84: mol_type = other DNA
tttttttaagcagtggtatcaacgcagagtacnngaagatccnnctcatgacnntttttttttttttttttttttttttttttt

SEQ ID NO: 7998 - DNA, 84 bp, synthetic construct
  source 1..84: mol_type = other DNA
tttttttaagcagtggtatcaacgcagagtacnngaagatccnngtatccagnntttttttttttttttttttttttttttttt

SEQ ID NO: 7999 - DNA, 84 bp, synthetic construct
  source 1..84: mol_type = other DNA
tttttttaagcagtggtatcaacgcagagtacnngaagatccnnacgcctatnntttttttttttttttttttttttttttttt

SEQ ID NO: 8000 - DNA, 84 bp, synthetic construct
  source 1..84: mol_type = other DNA
tttttttaagcagtggtatcaacgcagagtacnngaagatccnnaacgacctnntttttttttttttttttttttttttttttt

SEQ ID NO: 8001 - DNA, 84 bp, synthetic construct
  source 1..84: mol_type = other DNA
tttttttaagcagtggtatcaacgcagagtacnngaagatccnnatcaggctnntttttttttttttttttttttttttttttt

SEQ ID NO: 8002 - DNA, 84 bp, synthetic construct
  source 1..84: mol_type = other DNA
tttttttaagcagtggtatcaacgcagagtacnngaagatccnncaagttcgnntttttttttttttttttttttttttttttt

SEQ ID NO: 8003 - DNA, 84 bp, synthetic construct
  source 1..84: mol_type = other DNA
tttttttaagcagtggtatcaacgcagagtacnngaagatccnntagccaganntttttttttttttttttttttttttttttt

SEQ ID NO: 8004 - DNA, 84 bp, synthetic construct
  source 1..84: mol_type = other DNA
tttttttaagcagtggtatcaacgcagagtacnngaagatccnncaatcacgnntttttttttttttttttttttttttttttt

SEQ ID NO: 8005 - DNA, 84 bp, synthetic construct
  source 1..84: mol_type = other DNA
tttttttaagcagtggtatcaacgcagagtacnngaagatccnngcaacaagnntttttttttttttttttttttttttttttt

SEQ ID NO: 8006 - DNA, 84 bp, synthetic construct
  source 1..84: mol_type = other DNA
tttttttaagcagtggtatcaacgcagagtacnngaagatccnncacgacaanntttttttttttttttttttttttttttttt

SEQ ID NO: 8007 - DNA, 84 bp, synthetic construct
  source 1..84: mol_type = other DNA
tttttttaagcagtggtatcaacgcagagtacnngaagatccnntacggaganntttttttttttttttttttttttttttttt

SEQ ID NO: 8008 - DNA, 84 bp, synthetic construct
  source 1..84: mol_type = other DNA
tttttttaagcagtggtatcaacgcagagtacnngaagatccnncgacaaganntttttttttttttttttttttttttttttt

SEQ ID NO: 8009 - DNA, 84 bp, synthetic construct
  source 1..84: mol_type = other DNA
tttttttaagcagtggtatcaacgcagagtacnngaagatccnncgaagtganntttttttttttttttttttttttttttttt

SEQ ID NO: 8010 - DNA, 84 bp, synthetic construct
  source 1..84: mol_type = other DNA
tttttttaagcagtggtatcaacgcagagtacnngaagatccnnagctggtanntttttttttttttttttttttttttttttt

SEQ ID NO: 8011 - DNA, 84 bp, synthetic construct
  source 1..84: mol_type = other DNA
tttttttaagcagtggtatcaacgcagagtacnngaagatccnnaactaggcnntttttttttttttttttttttttttttttt

SEQ ID NO: 8012 - DNA, 84 bp, synthetic construct
  source 1..84: mol_type = other DNA
tttttttaagcagtggtatcaacgcagagtacnngaagatccnncagcaagtnntttttttttttttttttttttttttttttt

SEQ ID NO: 8013 - DNA, 84 bp, synthetic construct
  source 1..84: mol_type = other DNA
tttttttaagcagtggtatcaacgcagagtacnngaagatccnnacgaggtanntttttttttttttttttttttttttttttt

SEQ ID NO: 8014 - DNA, 84 bp, synthetic construct
  source 1..84: mol_type = other DNA
tttttttaagcagtggtatcaacgcagagtacnngaagatccnncatcttccnntttttttttttttttttttttttttttttt

SEQ ID NO: 8015 - DNA, 84 bp, synthetic construct
  source 1..84: mol_type = other DNA
tttttttaagcagtggtatcaacgcagagtacnngaagatccnncctgaatcnntttttttttttttttttttttttttttttt

SEQ ID NO: 8016 - DNA, 84 bp, synthetic construct
  source 1..84: mol_type = other DNA
tttttttaagcagtggtatcaacgcagagtacnngaagatccnntgcagactnntttttttttttttttttttttttttttttt

SEQ ID NO: 8017 - DNA, 84 bp, synthetic construct
  source 1..84: mol_type = other DNA
tttttttaagcagtggtatcaacgcagagtacnngaagatccnnagatgtggnntttttttttttttttttttttttttttttt

SEQ ID NO: 8018 - DNA, 84 bp, synthetic construct
  source 1..84: mol_type = other DNA
tttttttaagcagtggtatcaacgcagagtacnngaagatccnnagttcgacnntttttttttttttttttttttttttttttt

SEQ ID NO: 8019 - DNA, 84 bp, synthetic construct
  source 1..84: mol_type = other DNA
tttttttaagcagtggtatcaacgcagagtacnngaagatccnnacaacctcnntttttttttttttttttttttttttttttt

SEQ ID NO: 8020 - DNA, 84 bp, synthetic construct
  source 1..84: mol_type = other DNA
tttttttaagcagtggtatcaacgcagagtacnngaagatccnncatggtagnntttttttttttttttttttttttttttttt

SEQ ID NO: 8021 - DNA, 84 bp, synthetic construct
  source 1..84: mol_type = other DNA
tttttttaagcagtggtatcaacgcagagtacnngaagatccnncgtatctcnntttttttttttttttttttttttttttttt

SEQ ID NO: 8022 - DNA, 84 bp, synthetic construct
  source 1..84: mol_type = other DNA
tttttttaagcagtggtatcaacgcagagtacnngaagatccnncctagttcnntttttttttttttttttttttttttttttt

SEQ ID NO: 8023 - DNA, 84 bp, synthetic construct
  source 1..84: mol_type = other DNA
tttttttaagcagtggtatcaacgcagagtacnngaagatccnncaagagtcnntttttttttttttttttttttttttttttt

SEQ ID NO: 8024 - DNA, 84 bp, synthetic construct
  source 1..84: mol_type = other DNA
tttttttaagcagtggtatcaacgcagagtacnnagtggagannaatcggcanntttttttttttttttttttttttttttttt

SEQ ID NO: 8025 - DNA, 84 bp, synthetic construct
  source 1..84: mol_type = other DNA
tttttttaagcagtggtatcaacgcagagtacnnagtggaganntacggcatnntttttttttttttttttttttttttttttt

SEQ ID NO: 8026 - DNA, 84 bp, synthetic construct
  source 1..84: mol_type = other DNA
tttttttaagcagtggtatcaacgcagagtacnnagtggagannttggatcgnntttttttttttttttttttttttttttttt

SEQ ID NO: 8027 - DNA, 84 bp, synthetic construct
  source 1..84: mol_type = other DNA
tttttttaagcagtggtatcaacgcagagtacnnagtggaganntggaacganntttttttttttttttttttttttttttttt

SEQ ID NO: 8028 - DNA, 84 bp, synthetic construct
  source 1..84: mol_type = other DNA
tttttttaagcagtggtatcaacgcagagtacnnagtggagannggcaatcanntttttttttttttttttttttttttttttt

SEQ ID NO: 8029 - DNA, 84 bp, synthetic construct
  source 1..84: mol_type = other DNA
tttttttaagcagtggtatcaacgcagagtacnnagtggaganngaatccganntttttttttttttttttttttttttttttt

SEQ ID NO: 8030 - DNA, 84 bp, synthetic construct
  source 1..84: mol_type = other DNA
tttttttaagcagtggtatcaacgcagagtacnnagtggagannttacggtgnntttttttttttttttttttttttttttttt

SEQ ID NO: 8031 - DNA, 84 bp, synthetic construct
  source 1..84: mol_type = other DNA
tttttttaagcagtggtatcaacgcagagtacnnagtggaganncatatcggnntttttttttttttttttttttttttttttt

SEQ ID NO: 8032 - DNA, 84 bp, synthetic construct
  source 1..84: mol_type = other DNA
tttttttaagcagtggtatcaacgcagagtacnnagtggaganncttcggtanntttttttttttttttttttttttttttttt

SEQ ID NO: 8033 - DNA, 84 bp, synthetic construct
  source 1..84: mol_type = other DNA
tttttttaagcagtggtatcaacgcagagtacnnagtggaganntcctaacgnntttttttttttttttttttttttttttttt

SEQ ID NO: 8034 - DNA, 84 bp, synthetic construct
  source 1..84: mol_type = other DNA
tttttttaagcagtggtatcaacgcagagtacnnagtggaganngtaagccanntttttttttttttttttttttttttttttt

SEQ ID NO: 8035 - DNA, 84 bp, synthetic construct
  source 1..84: mol_type = other DNA
tttttttaagcagtggtatcaacgcagagtacnnagtggaganntaaggtggnntttttttttttttttttttttttttttttt

SEQ ID NO: 8036 - DNA, 84 bp, synthetic construct
  source 1..84: mol_type = other DNA
tttttttaagcagtggtatcaacgcagagtacnnagtggagannggtaagctnntttttttttttttttttttttttttttttt

SEQ ID NO: 8037 - DNA, 84 bp, synthetic construct
  source 1..84: mol_type = other DNA
tttttttaagcagtggtatcaacgcagagtacnnagtggaganntgtgtcganntttttttttttttttttttttttttttttt

SEQ ID NO: 8038 - DNA, 84 bp, synthetic construct
  source 1..84: mol_type = other DNA
tttttttaagcagtggtatcaacgcagagtacnnagtggaganngagcatganntttttttttttttttttttttttttttttt

SEQ ID NO: 8039 - DNA, 84 bp, synthetic construct
  source 1..84: mol_type = other DNA
tttttttaagcagtggtatcaacgcagagtacnnagtggaganntcgaagtcnntttttttttttttttttttttttttttttt

SEQ ID NO: 8040 - DNA, 84 bp, synthetic construct
  source 1..84: mol_type = other DNA
tttttttaagcagtggtatcaacgcagagtacnnagtggagannggtgaacanntttttttttttttttttttttttttttttt

SEQ ID NO: 8041 - DNA, 84 bp, synthetic construct
  source 1..84: mol_type = other DNA
tttttttaagcagtggtatcaacgcagagtacnnagtggagannacatgcacnntttttttttttttttttttttttttttttt

SEQ ID NO: 8042 - DNA, 84 bp, synthetic construct
  source 1..84: mol_type = other DNA
tttttttaagcagtggtatcaacgcagagtacnnagtggagannccaacagtnntttttttttttttttttttttttttttttt

SEQ ID NO: 8043 - DNA, 84 bp, synthetic construct
  source 1..84: mol_type = other DNA
tttttttaagcagtggtatcaacgcagagtacnnagtggagannagaacagcnntttttttttttttttttttttttttttttt

SEQ ID NO: 8044 - DNA, 84 bp, synthetic construct
  source 1..84: mol_type = other DNA
tttttttaagcagtggtatcaacgcagagtacnnagtggaganngaacacgtnntttttttttttttttttttttttttttttt

SEQ ID NO: 8045 - DNA, 84 bp, synthetic construct
  source 1..84: mol_type = other DNA
tttttttaagcagtggtatcaacgcagagtacnnagtggagannggtcttcanntttttttttttttttttttttttttttttt

SEQ ID NO: 8046 - DNA, 84 bp, synthetic construct
  source 1..84: mol_type = other DNA
tttttttaagcagtggtatcaacgcagagtacnnagtggagannaggttcagnntttttttttttttttttttttttttttttt

SEQ ID NO: 8047 - DNA, 84 bp, synthetic construct
  source 1..84: mol_type = other DNA
tttttttaagcagtggtatcaacgcagagtacnnagtggagannctagagcanntttttttttttttttttttttttttttttt

SEQ ID NO: 8048 - DNA, 84 bp, synthetic construct
  source 1..84: mol_type = other DNA
tttttttaagcagtggtatcaacgcagagtacnnagtggaganncttctagcnntttttttttttttttttttttttttttttt

SEQ ID NO: 8049 - DNA, 84 bp, synthetic construct
  source 1..84: mol_type = other DNA
tttttttaagcagtggtatcaacgcagagtacnnagtggaganngagtaacgnntttttttttttttttttttttttttttttt

SEQ ID NO: 8050 - DNA, 84 bp, synthetic construct
  source 1..84: mol_type = other DNA
tttttttaagcagtggtatcaacgcagagtacnnagtggagannctaagaggnntttttttttttttttttttttttttttttt

SEQ ID NO: 8051 - DNA, 84 bp, synthetic construct
  source 1..84: mol_type = other DNA
tttttttaagcagtggtatcaacgcagagtacnnagtggagannacgtgtagnntttttttttttttttttttttttttttttt

SEQ ID NO: 8052 - DNA, 84 bp, synthetic construct
  source 1..84: mol_type = other DNA
tttttttaagcagtggtatcaacgcagagtacnnagtggagannactacaggnntttttttttttttttttttttttttttttt

SEQ ID NO: 8053 - DNA, 84 bp, synthetic construct
  source 1..84: mol_type = other DNA
tttttttaagcagtggtatcaacgcagagtacnnagtggaganntacaggtcnntttttttttttttttttttttttttttttt

SEQ ID NO: 8054 - DNA, 84 bp, synthetic construct
  source 1..84: mol_type = other DNA
tttttttaagcagtggtatcaacgcagagtacnnagtggagannctcacatgnntttttttttttttttttttttttttttttt

SEQ ID NO: 8055 - DNA, 84 bp, synthetic construct
  source 1..84: mol_type = other DNA
tttttttaagcagtggtatcaacgcagagtacnnagtggagannactaggagnntttttttttttttttttttttttttttttt

SEQ ID NO: 8056 - DNA, 84 bp, synthetic construct
  source 1..84: mol_type = other DNA
tttttttaagcagtggtatcaacgcagagtacnnagtggagannccatagganntttttttttttttttttttttttttttttt

SEQ ID NO: 8057 - DNA, 84 bp, synthetic construct
  source 1..84: mol_type = other DNA
tttttttaagcagtggtatcaacgcagagtacnnagtggagannggagaatcnntttttttttttttttttttttttttttttt

SEQ ID NO: 8058 - DNA, 84 bp, synthetic construct
  source 1..84: mol_type = other DNA
tttttttaagcagtggtatcaacgcagagtacnnagtggaganngccaagaanntttttttttttttttttttttttttttttt

SEQ ID NO: 8059 - DNA, 84 bp, synthetic construct
  source 1..84: mol_type = other DNA
tttttttaagcagtggtatcaacgcagagtacnnagtggagannaaggcaagnntttttttttttttttttttttttttttttt

SEQ ID NO: 8060 - DNA, 84 bp, synthetic construct
  source 1..84: mol_type = other DNA
tttttttaagcagtggtatcaacgcagagtacnnagtggagannaatgtcgcnntttttttttttttttttttttttttttttt

SEQ ID NO: 8061 - DNA, 84 bp, synthetic construct
  source 1..84: mol_type = other DNA
tttttttaagcagtggtatcaacgcagagtacnnagtggagannatggaaccnntttttttttttttttttttttttttttttt

SEQ ID NO: 8062 - DNA, 84 bp, synthetic construct
  source 1..84: mol_type = other DNA
tttttttaagcagtggtatcaacgcagagtacnnagtggagannagaggcatnntttttttttttttttttttttttttttttt

SEQ ID NO: 8063 - DNA, 84 bp, synthetic construct
  source 1..84: mol_type = other DNA
tttttttaagcagtggtatcaacgcagagtacnnagtggaganntgcatagcnntttttttttttttttttttttttttttttt

SEQ ID NO: 8064 - DNA, 84 bp, synthetic construct
  source 1..84: mol_type = other DNA
tttttttaagcagtggtatcaacgcagagtacnnagtggagannctaacgganntttttttttttttttttttttttttttttt

SEQ ID NO: 8065 - DNA, 84 bp, synthetic construct
  source 1..84: mol_type = other DNA
tttttttaagcagtggtatcaacgcagagtacnnagtggaganntatcgaggnntttttttttttttttttttttttttttttt

SEQ ID NO: 8066 - DNA, 84 bp, synthetic construct
  source 1..84: mol_type = other DNA
tttttttaagcagtggtatcaacgcagagtacnnagtggaganncatagcctnntttttttttttttttttttttttttttttt

SEQ ID NO: 8067 - DNA, 84 bp, synthetic construct
  source 1..84: mol_type = other DNA
tttttttaagcagtggtatcaacgcagagtacnnagtggagannatcgagacnntttttttttttttttttttttttttttttt

SEQ ID NO: 8068 - DNA, 84 bp, synthetic construct
  source 1..84: mol_type = other DNA
tttttttaagcagtggtatcaacgcagagtacnnagtggagannggaagagtnntttttttttttttttttttttttttttttt

SEQ ID NO: 8069 - DNA, 84 bp, synthetic construct
  source 1..84: mol_type = other DNA
tttttttaagcagtggtatcaacgcagagtacnnagtggagannccaagtagnntttttttttttttttttttttttttttttt

SEQ ID NO: 8070 - DNA, 84 bp, synthetic construct
  source 1..84: mol_type = other DNA
tttttttaagcagtggtatcaacgcagagtacnnagtggagannctgaacagnntttttttttttttttttttttttttttttt

SEQ ID NO: 8071 - DNA, 84 bp, synthetic construct
  source 1..84: mol_type = other DNA
tttttttaagcagtggtatcaacgcagagtacnnagtggaganngtaggttcnntttttttttttttttttttttttttttttt

SEQ ID NO: 8072 - DNA, 84 bp, synthetic construct
  source 1..84: mol_type = other DNA
tttttttaagcagtggtatcaacgcagagtacnnagtggaganngtatggacnntttttttttttttttttttttttttttttt

SEQ ID NO: 8073 - DNA, 84 bp, synthetic construct
  source 1..84: mol_type = other DNA
tttttttaagcagtggtatcaacgcagagtacnnagtggaganntcgcaacanntttttttttttttttttttttttttttttt

SEQ ID NO: 8074 - DNA, 84 bp, synthetic construct
  source 1..84: mol_type = other DNA
tttttttaagcagtggtatcaacgcagagtacnnagtggagannccgctaatnntttttttttttttttttttttttttttttt

SEQ ID NO: 8075 - DNA, 84 bp, synthetic construct
  source 1..84: mol_type = other DNA
tttttttaagcagtggtatcaacgcagagtacnnagtggaganngattcgcanntttttttttttttttttttttttttttttt

SEQ ID NO: 8076 - DNA, 84 bp, synthetic construct
  source 1..84: mol_type = other DNA
tttttttaagcagtggtatcaacgcagagtacnnagtggaganncgatggaanntttttttttttttttttttttttttttttt

SEQ ID NO: 8077 - DNA, 84 bp, synthetic construct
  source 1..84: mol_type = other DNA
tttttttaagcagtggtatcaacgcagagtacnnagtggagannagcaagganntttttttttttttttttttttttttttttt

SEQ ID NO: 8078 - DNA, 84 bp, synthetic construct
  source 1..84: mol_type = other DNA
tttttttaagcagtggtatcaacgcagagtacnnagtggaganncgtagcaanntttttttttttttttttttttttttttttt

SEQ ID NO: 8079 - DNA, 84 bp, synthetic construct
  source 1..84: mol_type = other DNA
tttttttaagcagtggtatcaacgcagagtacnnagtggaganntggcagtanntttttttttttttttttttttttttttttt

SEQ ID NO: 8080 - DNA, 84 bp, synthetic construct
  source 1..84: mol_type = other DNA
tttttttaagcagtggtatcaacgcagagtacnnagtggaganncggtagttnntttttttttttttttttttttttttttttt

SEQ ID NO: 8081 - DNA, 84 bp, synthetic construct
  source 1..84: mol_type = other DNA
tttttttaagcagtggtatcaacgcagagtacnnagtggaganntgacttcgnntttttttttttttttttttttttttttttt

SEQ ID NO: 8082 - DNA, 84 bp, synthetic construct
  source 1..84: mol_type = other DNA
tttttttaagcagtggtatcaacgcagagtacnnagtggaganngagtgcaanntttttttttttttttttttttttttttttt

SEQ ID NO: 8083 - DNA, 84 bp, synthetic construct
  source 1..84: mol_type = other DNA
tttttttaagcagtggtatcaacgcagagtacnnagtggagannacggtaacnntttttttttttttttttttttttttttttt

SEQ ID NO: 8084 - DNA, 84 bp, synthetic construct
  source 1..84: mol_type = other DNA
tttttttaagcagtggtatcaacgcagagtacnnagtggagannaagtggtgnntttttttttttttttttttttttttttttt

SEQ ID NO: 8085 - DNA, 84 bp, synthetic construct
  source 1..84: mol_type = other DNA
tttttttaagcagtggtatcaacgcagagtacnnagtggagannggagacaanntttttttttttttttttttttttttttttt

SEQ ID NO: 8086 - DNA, 84 bp, synthetic construct
  source 1..84: mol_type = other DNA
tttttttaagcagtggtatcaacgcagagtacnnagtggaganntcaaggacnntttttttttttttttttttttttttttttt

SEQ ID NO: 8087 - DNA, 84 bp, synthetic construct
  source 1..84: mol_type = other DNA
tttttttaagcagtggtatcaacgcagagtacnnagtggagannaagagagcnntttttttttttttttttttttttttttttt

SEQ ID NO: 8088 - DNA, 84 bp, synthetic construct
  source 1..84: mol_type = other DNA
tttttttaagcagtggtatcaacgcagagtacnnagtggaganncgagagatnntttttttttttttttttttttttttttttt

SEQ ID NO: 8089 - DNA, 84 bp, synthetic construct
  source 1..84: mol_type = other DNA
tttttttaagcagtggtatcaacgcagagtacnnagtggagannacagatggnntttttttttttttttttttttttttttttt

SEQ ID NO: 8090 - DNA, 84 bp, synthetic construct
  source 1..84: mol_type = other DNA
tttttttaagcagtggtatcaacgcagagtacnnagtggagannaggagtcanntttttttttttttttttttttttttttttt

SEQ ID NO: 8091 - DNA, 84 bp, synthetic construct
  source 1..84: mol_type = other DNA
tttttttaagcagtggtatcaacgcagagtacnnagtggaganncgtgttacnntttttttttttttttttttttttttttttt

SEQ ID NO: 8092 - DNA, 84 bp, synthetic construct
  source 1..84: mol_type = other DNA
tttttttaagcagtggtatcaacgcagagtacnnagtggaganntagtgtgcnntttttttttttttttttttttttttttttt

SEQ ID NO: 8093 - DNA, 84 bp, synthetic construct
  source 1..84: mol_type = other DNA
tttttttaagcagtggtatcaacgcagagtacnnagtggagannctcatgacnntttttttttttttttttttttttttttttt

SEQ ID NO: 8094 - DNA, 84 bp, synthetic construct
  source 1..84: mol_type = other DNA
tttttttaagcagtggtatcaacgcagagtacnnagtggaganngtatccagnntttttttttttttttttttttttttttttt

SEQ ID NO: 8095 - DNA, 84 bp, synthetic construct
  source 1..84: mol_type = other DNA
tttttttaagcagtggtatcaacgcagagtacnnagtggagannacgcctatnntttttttttttttttttttttttttttttt

SEQ ID NO: 8096 - DNA, 84 bp, synthetic construct
  source 1..84: mol_type = other DNA
tttttttaagcagtggtatcaacgcagagtacnnagtggagannaacgacctnntttttttttttttttttttttttttttttt

SEQ ID NO: 8097 - DNA, 84 bp, synthetic construct
  source 1..84: mol_type = other DNA
tttttttaagcagtggtatcaacgcagagtacnnagtggagannatcaggctnntttttttttttttttttttttttttttttt

SEQ ID NO: 8098 - DNA, 84 bp, synthetic construct
  source 1..84: mol_type = other DNA
tttttttaagcagtggtatcaacgcagagtacnnagtggaganncaagttcgnntttttttttttttttttttttttttttttt

SEQ ID NO: 8099 - DNA, 84 bp, synthetic construct
  source 1..84: mol_type = other DNA
tttttttaagcagtggtatcaacgcagagtacnnagtggaganntagccaganntttttttttttttttttttttttttttttt

SEQ ID NO: 8100 - DNA, 84 bp, synthetic construct
  source 1..84: mol_type = other DNA
tttttttaagcagtggtatcaacgcagagtacnnagtggaganncaatcacgnntttttttttttttttttttttttttttttt

SEQ ID NO: 8101 - DNA, 84 bp, synthetic construct
  source 1..84: mol_type = other DNA
tttttttaagcagtggtatcaacgcagagtacnnagtggaganngcaacaagnntttttttttttttttttttttttttttttt

SEQ ID NO: 8102 - DNA, 84 bp, synthetic construct
  source 1..84: mol_type = other DNA
tttttttaagcagtggtatcaacgcagagtacnnagtggaganncacgacaanntttttttttttttttttttttttttttttt

SEQ ID NO: 8103 - DNA, 84 bp, synthetic construct
  source 1..84: mol_type = other DNA
tttttttaagcagtggtatcaacgcagagtacnnagtggaganntacggaganntttttttttttttttttttttttttttttt

SEQ ID NO: 8104 - DNA, 84 bp, synthetic construct
  source 1..84: mol_type = other DNA
tttttttaagcagtggtatcaacgcagagtacnnagtggaganncgacaaganntttttttttttttttttttttttttttttt

SEQ ID NO: 8105 - DNA, 84 bp, synthetic construct
  source 1..84: mol_type = other DNA
tttttttaagcagtggtatcaacgcagagtacnnagtggaganncgaagtganntttttttttttttttttttttttttttttt

SEQ ID NO: 8106 - DNA, 84 bp, synthetic construct
  source 1..84: mol_type = other DNA
tttttttaagcagtggtatcaacgcagagtacnnagtggagannagctggtanntttttttttttttttttttttttttttttt

SEQ ID NO: 8107 - DNA, 84 bp, synthetic construct
  source 1..84: mol_type = other DNA
tttttttaagcagtggtatcaacgcagagtacnnagtggagannaactaggcnntttttttttttttttttttttttttttttt

SEQ ID NO: 8108 - DNA, 84 bp, synthetic construct
  source 1..84: mol_type = other DNA
tttttttaagcagtggtatcaacgcagagtacnnagtggaganncagcaagtnntttttttttttttttttttttttttttttt

SEQ ID NO: 8109 - DNA, 84 bp, synthetic construct
  source 1..84: mol_type = other DNA
tttttttaagcagtggtatcaacgcagagtacnnagtggagannacgaggtanntttttttttttttttttttttttttttttt

SEQ ID NO: 8110 - DNA, 84 bp, synthetic construct
  source 1..84: mol_type = other DNA
tttttttaagcagtggtatcaacgcagagtacnnagtggaganncatcttccnntttttttttttttttttttttttttttttt

SEQ ID NO: 8111 - DNA, 84 bp, synthetic construct
  source 1..84: mol_type = other DNA
tttttttaagcagtggtatcaacgcagagtacnnagtggaganncctgaatcnntttttttttttttttttttttttttttttt

SEQ ID NO: 8112 - DNA, 84 bp, synthetic construct
  source 1..84: mol_type = other DNA
tttttttaagcagtggtatcaacgcagagtacnnagtggaganntgcagactnntttttttttttttttttttttttttttttt

SEQ ID NO: 8113 - DNA, 84 bp, synthetic construct
  source 1..84: mol_type = other DNA
tttttttaagcagtggtatcaacgcagagtacnnagtggagannagatgtggnntttttttttttttttttttttttttttttt

SEQ ID NO: 8114 - DNA, 84 bp, synthetic construct
  source 1..84: mol_type = other DNA
tttttttaagcagtggtatcaacgcagagtacnnagtggagannagttcgacnntttttttttttttttttttttttttttttt

SEQ ID NO: 8115 - DNA, 84 bp, synthetic construct
  source 1..84: mol_type = other DNA
tttttttaagcagtggtatcaacgcagagtacnnagtggagannacaacctcnntttttttttttttttttttttttttttttt

SEQ ID NO: 8116 - DNA, 84 bp, synthetic construct
  source 1..84: mol_type = other DNA
tttttttaagcagtggtatcaacgcagagtacnnagtggaganncatggtagnntttttttttttttttttttttttttttttt

SEQ ID NO: 8117 - DNA, 84 bp, synthetic construct
  source 1..84: mol_type = other DNA
tttttttaagcagtggtatcaacgcagagtacnnagtggaganncgtatctcnntttttttttttttttttttttttttttttt

SEQ ID NO: 8118 - DNA, 84 bp, synthetic construct
  source 1..84: mol_type = other DNA
tttttttaagcagtggtatcaacgcagagtacnnagtggaganncctagttcnntttttttttttttttttttttttttttttt

SEQ ID NO: 8119 - DNA, 84 bp, synthetic construct
  source 1..84: mol_type = other DNA
tttttttaagcagtggtatcaacgcagagtacnnagtggaganncaagagtcnntttttttttttttttttttttttttttttt

SEQ ID NO: 8120 - DNA, 84 bp, synthetic construct
  source 1..84: mol_type = other DNA
tttttttaagcagtggtatcaacgcagagtacnntagtagccnnaatcggcanntttttttttttttttttttttttttttttt

SEQ ID NO: 8121 - DNA, 84 bp, synthetic construct
  source 1..84: mol_type = other DNA
tttttttaagcagtggtatcaacgcagagtacnntagtagccnntacggcatnntttttttttttttttttttttttttttttt

SEQ ID NO: 8122 - DNA, 84 bp, synthetic construct
  source 1..84: mol_type = other DNA
tttttttaagcagtggtatcaacgcagagtacnntagtagccnnttggatcgnntttttttttttttttttttttttttttttt

SEQ ID NO: 8123 - DNA, 84 bp, synthetic construct
  source 1..84: mol_type = other DNA
tttttttaagcagtggtatcaacgcagagtacnntagtagccnntggaacganntttttttttttttttttttttttttttttt

SEQ ID NO: 8124 - DNA, 84 bp, synthetic construct
  source 1..84: mol_type = other DNA
tttttttaagcagtggtatcaacgcagagtacnntagtagccnnggcaatcanntttttttttttttttttttttttttttttt

SEQ ID NO: 8125 - DNA, 84 bp, synthetic construct
  source 1..84: mol_type = other DNA
tttttttaagcagtggtatcaacgcagagtacnntagtagccnngaatccganntttttttttttttttttttttttttttttt

SEQ ID NO: 8126 - DNA, 84 bp, synthetic construct
  source 1..84: mol_type = other DNA
tttttttaagcagtggtatcaacgcagagtacnntagtagccnnttacggtgnntttttttttttttttttttttttttttttt

SEQ ID NO: 8127 - DNA, 84 bp, synthetic construct
  source 1..84: mol_type = other DNA
tttttttaagcagtggtatcaacgcagagtacnntagtagccnncatatcggnntttttttttttttttttttttttttttttt

SEQ ID NO: 8128 - DNA, 84 bp, synthetic construct
  source 1..84: mol_type = other DNA
tttttttaagcagtggtatcaacgcagagtacnntagtagccnncttcggtanntttttttttttttttttttttttttttttt

SEQ ID NO: 8129 - DNA, 84 bp, synthetic construct
  source 1..84: mol_type = other DNA
tttttttaagcagtggtatcaacgcagagtacnntagtagccnntcctaacgnntttttttttttttttttttttttttttttt

SEQ ID NO: 8130 - DNA, 84 bp, synthetic construct
  source 1..84: mol_type = other DNA
tttttttaagcagtggtatcaacgcagagtacnntagtagccnngtaagccanntttttttttttttttttttttttttttttt

SEQ ID NO: 8131 - DNA, 84 bp, synthetic construct
  source 1..84: mol_type = other DNA
tttttttaagcagtggtatcaacgcagagtacnntagtagccnntaaggtggnntttttttttttttttttttttttttttttt

SEQ ID NO: 8132 - DNA, 84 bp, synthetic construct
  source 1..84: mol_type = other DNA
tttttttaagcagtggtatcaacgcagagtacnntagtagccnnggtaagctnntttttttttttttttttttttttttttttt

SEQ ID NO: 8133 - DNA, 84 bp, synthetic construct
  source 1..84: mol_type = other DNA
tttttttaagcagtggtatcaacgcagagtacnntagtagccnntgtgtcganntttttttttttttttttttttttttttttt

SEQ ID NO: 8134 - DNA, 84 bp, synthetic construct
  source 1..84: mol_type = other DNA
tttttttaagcagtggtatcaacgcagagtacnntagtagccnngagcatganntttttttttttttttttttttttttttttt

SEQ ID NO: 8135 - DNA, 84 bp, synthetic construct
  source 1..84: mol_type = other DNA
tttttttaagcagtggtatcaacgcagagtacnntagtagccnntcgaagtcnntttttttttttttttttttttttttttttt

SEQ ID NO: 8136 - DNA, 84 bp, synthetic construct
  source 1..84: mol_type = other DNA
tttttttaagcagtggtatcaacgcagagtacnntagtagccnnggtgaacanntttttttttttttttttttttttttttttt

SEQ ID NO: 8137 - DNA, 84 bp, synthetic construct
  source 1..84: mol_type = other DNA
tttttttaagcagtggtatcaacgcagagtacnntagtagccnnacatgcacnntttttttttttttttttttttttttttttt

SEQ ID NO: 8138 - DNA, 84 bp, synthetic construct
  source 1..84: mol_type = other DNA
tttttttaagcagtggtatcaacgcagagtacnntagtagccnnccaacagtnntttttttttttttttttttttttttttttt

SEQ ID NO: 8139 - DNA, 84 bp, synthetic construct
  source 1..84: mol_type = other DNA
tttttttaagcagtggtatcaacgcagagtacnntagtagccnnagaacagcnntttttttttttttttttttttttttttttt

SEQ ID NO: 8140 - DNA, 84 bp, synthetic construct
  source 1..84: mol_type = other DNA
tttttttaagcagtggtatcaacgcagagtacnntagtagccnngaacacgtnntttttttttttttttttttttttttttttt

SEQ ID NO: 8141 - DNA, 84 bp, synthetic construct
  source 1..84: mol_type = other DNA
tttttttaagcagtggtatcaacgcagagtacnntagtagccnnggtcttcanntttttttttttttttttttttttttttttt

SEQ ID NO: 8142 - DNA, 84 bp, synthetic construct
  source 1..84: mol_type = other DNA
tttttttaagcagtggtatcaacgcagagtacnntagtagccnnaggttcagnntttttttttttttttttttttttttttttt

SEQ ID NO: 8143 - DNA, 84 bp, synthetic construct
  source 1..84: mol_type = other DNA
tttttttaagcagtggtatcaacgcagagtacnntagtagccnnctagagcanntttttttttttttttttttttttttttttt

SEQ ID NO: 8144 - DNA, 84 bp, synthetic construct
  source 1..84: mol_type = other DNA
tttttttaagcagtggtatcaacgcagagtacnntagtagccnncttctagcnntttttttttttttttttttttttttttttt

SEQ ID NO: 8145 - DNA, 84 bp, synthetic construct
  source 1..84: mol_type = other DNA
tttttttaagcagtggtatcaacgcagagtacnntagtagccnngagtaacgnntttttttttttttttttttttttttttttt

SEQ ID NO: 8146 - DNA, 84 bp, synthetic construct
  source 1..84: mol_type = other DNA
tttttttaagcagtggtatcaacgcagagtacnntagtagccnnctaagaggnntttttttttttttttttttttttttttttt

SEQ ID NO: 8147 - DNA, 84 bp, synthetic construct
  source 1..84: mol_type = other DNA
tttttttaagcagtggtatcaacgcagagtacnntagtagccnnacgtgtagnntttttttttttttttttttttttttttttt

SEQ ID NO: 8148 - DNA, 84 bp, synthetic construct
  source 1..84: mol_type = other DNA
tttttttaagcagtggtatcaacgcagagtacnntagtagccnnactacaggnntttttttttttttttttttttttttttttt

SEQ ID NO: 8149 - DNA, 84 bp, synthetic construct
  source 1..84: mol_type = other DNA
tttttttaagcagtggtatcaacgcagagtacnntagtagccnntacaggtcnntttttttttttttttttttttttttttttt

SEQ ID NO: 8150 - DNA, 84 bp, synthetic construct
  source 1..84: mol_type = other DNA
tttttttaagcagtggtatcaacgcagagtacnntagtagccnnctcacatgnntttttttttttttttttttttttttttttt

SEQ ID NO: 8151 - DNA, 84 bp, synthetic construct
  source 1..84: mol_type = other DNA
tttttttaagcagtggtatcaacgcagagtacnntagtagccnnactaggagnntttttttttttttttttttttttttttttt

SEQ ID NO: 8152 - DNA, 84 bp, synthetic construct
  source 1..84: mol_type = other DNA
tttttttaagcagtggtatcaacgcagagtacnntagtagccnnccatagganntttttttttttttttttttttttttttttt

SEQ ID NO: 8153 - DNA, 84 bp, synthetic construct
  source 1..84: mol_type = other DNA
tttttttaagcagtggtatcaacgcagagtacnntagtagccnnggagaatcnntttttttttttttttttttttttttttttt

SEQ ID NO: 8154 - DNA, 84 bp, synthetic construct
  source 1..84: mol_type = other DNA
tttttttaagcagtggtatcaacgcagagtacnntagtagccnngccaagaanntttttttttttttttttttttttttttttt

SEQ ID NO: 8155 - DNA, 84 bp, synthetic construct
  source 1..84: mol_type = other DNA
tttttttaagcagtggtatcaacgcagagtacnntagtagccnnaaggcaagnntttttttttttttttttttttttttttttt

SEQ ID NO: 8156 - DNA, 84 bp, synthetic construct
  source 1..84: mol_type = other DNA
tttttttaagcagtggtatcaacgcagagtacnntagtagccnnaatgtcgcnntttttttttttttttttttttttttttttt

SEQ ID NO: 8157 - DNA, 84 bp, synthetic construct
  source 1..84: mol_type = other DNA
tttttttaagcagtggtatcaacgcagagtacnntagtagccnnatggaaccnntttttttttttttttttttttttttttttt

SEQ ID NO: 8158 - DNA, 84 bp, synthetic construct
  source 1..84: mol_type = other DNA
tttttttaagcagtggtatcaacgcagagtacnntagtagccnnagaggcatnntttttttttttttttttttttttttttttt

SEQ ID NO: 8159 - DNA, 84 bp, synthetic construct
  source 1..84: mol_type = other DNA
tttttttaagcagtggtatcaacgcagagtacnntagtagccnntgcatagcnntttttttttttttttttttttttttttttt

SEQ ID NO: 8160 - DNA, 84 bp, synthetic construct
  source 1..84: mol_type = other DNA
tttttttaagcagtggtatcaacgcagagtacnntagtagccnnctaacgganntttttttttttttttttttttttttttttt

SEQ ID NO: 8161 - DNA, 84 bp, synthetic construct
  source 1..84: mol_type = other DNA
tttttttaagcagtggtatcaacgcagagtacnntagtagccnntatcgaggnntttttttttttttttttttttttttttttt

SEQ ID NO: 8162 - DNA, 84 bp, synthetic construct
  source 1..84: mol_type = other DNA
tttttttaagcagtggtatcaacgcagagtacnntagtagccnncatagcctnntttttttttttttttttttttttttttttt

SEQ ID NO: 8163 - DNA, 84 bp, synthetic construct
  source 1..84: mol_type = other DNA
tttttttaagcagtggtatcaacgcagagtacnntagtagccnnatcgagacnntttttttttttttttttttttttttttttt

SEQ ID NO: 8164 - DNA, 84 bp, synthetic construct
  source 1..84: mol_type = other DNA
tttttttaagcagtggtatcaacgcagagtacnntagtagccnnggaagagtnntttttttttttttttttttttttttttttt

SEQ ID NO: 8165 - DNA, 84 bp, synthetic construct
  source 1..84: mol_type = other DNA
tttttttaagcagtggtatcaacgcagagtacnntagtagccnnccaagtagnntttttttttttttttttttttttttttttt

SEQ ID NO: 8166 - DNA, 84 bp, synthetic construct
  source 1..84: mol_type = other DNA
tttttttaagcagtggtatcaacgcagagtacnntagtagccnnctgaacagnntttttttttttttttttttttttttttttt

SEQ ID NO: 8167 - DNA, 84 bp, synthetic construct
  source 1..84: mol_type = other DNA
tttttttaagcagtggtatcaacgcagagtacnntagtagccnngtaggttcnntttttttttttttttttttttttttttttt

SEQ ID NO: 8168 - DNA, 84 bp, synthetic construct
  source 1..84: mol_type = other DNA
tttttttaagcagtggtatcaacgcagagtacnntagtagccnngtatggacnntttttttttttttttttttttttttttttt

SEQ ID NO: 8169 - DNA, 84 bp, synthetic construct
  source 1..84: mol_type = other DNA
tttttttaagcagtggtatcaacgcagagtacnntagtagccnntcgcaacanntttttttttttttttttttttttttttttt

SEQ ID NO: 8170 - DNA, 84 bp, synthetic construct
  source 1..84: mol_type = other DNA
tttttttaagcagtggtatcaacgcagagtacnntagtagccnnccgctaatnntttttttttttttttttttttttttttttt

SEQ ID NO: 8171 - DNA, 84 bp, synthetic construct
  source 1..84: mol_type = other DNA
tttttttaagcagtggtatcaacgcagagtacnntagtagccnngattcgcanntttttttttttttttttttttttttttttt

SEQ ID NO: 8172 - DNA, 84 bp, synthetic construct
  source 1..84: mol_type = other DNA
tttttttaagcagtggtatcaacgcagagtacnntagtagccnncgatggaanntttttttttttttttttttttttttttttt

SEQ ID NO: 8173 - DNA, 84 bp, synthetic construct
  source 1..84: mol_type = other DNA
tttttttaagcagtggtatcaacgcagagtacnntagtagccnnagcaagganntttttttttttttttttttttttttttttt

SEQ ID NO: 8174 - DNA, 84 bp, synthetic construct
  source 1..84: mol_type = other DNA
tttttttaagcagtggtatcaacgcagagtacnntagtagccnncgtagcaanntttttttttttttttttttttttttttttt

SEQ ID NO: 8175 - DNA, 84 bp, synthetic construct
  source 1..84: mol_type = other DNA
tttttttaagcagtggtatcaacgcagagtacnntagtagccnntggcagtanntttttttttttttttttttttttttttttt

SEQ ID NO: 8176 - DNA, 84 bp, synthetic construct
  source 1..84: mol_type = other DNA
tttttttaagcagtggtatcaacgcagagtacnntagtagccnncggtagttnntttttttttttttttttttttttttttttt

SEQ ID NO: 8177 - DNA, 84 bp, synthetic construct
  source 1..84: mol_type = other DNA
tttttttaagcagtggtatcaacgcagagtacnntagtagccnntgacttcgnntttttttttttttttttttttttttttttt

SEQ ID NO: 8178 - DNA, 84 bp, synthetic construct
  source 1..84: mol_type = other DNA
tttttttaagcagtggtatcaacgcagagtacnntagtagccnngagtgcaanntttttttttttttttttttttttttttttt

SEQ ID NO: 8179 - DNA, 84 bp, synthetic construct
  source 1..84: mol_type = other DNA
tttttttaagcagtggtatcaacgcagagtacnntagtagccnnacggtaacnntttttttttttttttttttttttttttttt

SEQ ID NO: 8180 - DNA, 84 bp, synthetic construct
  source 1..84: mol_type = other DNA
tttttttaagcagtggtatcaacgcagagtacnntagtagccnnaagtggtgnntttttttttttttttttttttttttttttt

SEQ ID NO: 8181 - DNA, 84 bp, synthetic construct
  source 1..84: mol_type = other DNA
tttttttaagcagtggtatcaacgcagagtacnntagtagccnnggagacaanntttttttttttttttttttttttttttttt

SEQ ID NO: 8182 - DNA, 84 bp, synthetic construct
  source 1..84: mol_type = other DNA
tttttttaagcagtggtatcaacgcagagtacnntagtagccnntcaaggacnntttttttttttttttttttttttttttttt

SEQ ID NO: 8183 - DNA, 84 bp, synthetic construct
  source 1..84: mol_type = other DNA
tttttttaagcagtggtatcaacgcagagtacnntagtagccnnaagagagcnntttttttttttttttttttttttttttttt

SEQ ID NO: 8184 - DNA, 84 bp, synthetic construct
  source 1..84: mol_type = other DNA
tttttttaagcagtggtatcaacgcagagtacnntagtagccnncgagagatnntttttttttttttttttttttttttttttt

SEQ ID NO: 8185 - DNA, 84 bp, synthetic construct
  source 1..84: mol_type = other DNA
tttttttaagcagtggtatcaacgcagagtacnntagtagccnnacagatggnntttttttttttttttttttttttttttttt

SEQ ID NO: 8186 - DNA, 84 bp, synthetic construct
  source 1..84: mol_type = other DNA
tttttttaagcagtggtatcaacgcagagtacnntagtagccnnaggagtcanntttttttttttttttttttttttttttttt

SEQ ID NO: 8187 - DNA, 84 bp, synthetic construct
  source 1..84: mol_type = other DNA
tttttttaagcagtggtatcaacgcagagtacnntagtagccnncgtgttacnntttttttttttttttttttttttttttttt

SEQ ID NO: 8188 - DNA, 84 bp, synthetic construct
  source 1..84: mol_type = other DNA
tttttttaagcagtggtatcaacgcagagtacnntagtagccnntagtgtgcnntttttttttttttttttttttttttttttt

SEQ ID NO: 8189 - DNA, 84 bp, synthetic construct
  source 1..84: mol_type = other DNA
tttttttaagcagtggtatcaacgcagagtacnntagtagccnnctcatgacnntttttttttttttttttttttttttttttt

SEQ ID NO: 8190 - DNA, 84 bp, synthetic construct
  source 1..84: mol_type = other DNA
tttttttaagcagtggtatcaacgcagagtacnntagtagccnngtatccagnntttttttttttttttttttttttttttttt

SEQ ID NO: 8191 - DNA, 84 bp, synthetic construct
  source 1..84: mol_type = other DNA
tttttttaagcagtggtatcaacgcagagtacnntagtagccnnacgcctatnntttttttttttttttttttttttttttttt

SEQ ID NO: 8192 - DNA, 84 bp, synthetic construct
  source 1..84: mol_type = other DNA
tttttttaagcagtggtatcaacgcagagtacnntagtagccnnaacgacctnntttttttttttttttttttttttttttttt

SEQ ID NO: 8193 - DNA, 84 bp, synthetic construct
  source 1..84: mol_type = other DNA
tttttttaagcagtggtatcaacgcagagtacnntagtagccnnatcaggctnntttttttttttttttttttttttttttttt

SEQ ID NO: 8194 - DNA, 84 bp, synthetic construct
  source 1..84: mol_type = other DNA
tttttttaagcagtggtatcaacgcagagtacnntagtagccnncaagttcgnntttttttttttttttttttttttttttttt

SEQ ID NO: 8195 - DNA, 84 bp, synthetic construct
  source 1..84: mol_type = other DNA
tttttttaagcagtggtatcaacgcagagtacnntagtagccnntagccaganntttttttttttttttttttttttttttttt

SEQ ID NO: 8196 - DNA, 84 bp, synthetic construct
  source 1..84: mol_type = other DNA
tttttttaagcagtggtatcaacgcagagtacnntagtagccnncaatcacgnntttttttttttttttttttttttttttttt

SEQ ID NO: 8197 - DNA, 84 bp, synthetic construct
  source 1..84: mol_type = other DNA
tttttttaagcagtggtatcaacgcagagtacnntagtagccnngcaacaagnntttttttttttttttttttttttttttttt

SEQ ID NO: 8198 - DNA, 84 bp, synthetic construct
  source 1..84: mol_type = other DNA
tttttttaagcagtggtatcaacgcagagtacnntagtagccnncacgacaanntttttttttttttttttttttttttttttt

SEQ ID NO: 8199 - DNA, 84 bp, synthetic construct
  source 1..84: mol_type = other DNA
tttttttaagcagtggtatcaacgcagagtacnntagtagccnntacggaganntttttttttttttttttttttttttttttt

SEQ ID NO: 8200 - DNA, 84 bp, synthetic construct
  source 1..84: mol_type = other DNA
tttttttaagcagtggtatcaacgcagagtacnntagtagccnncgacaaganntttttttttttttttttttttttttttttt

SEQ ID NO: 8201 - DNA, 84 bp, synthetic construct
  source 1..84: mol_type = other DNA
tttttttaagcagtggtatcaacgcagagtacnntagtagccnncgaagtganntttttttttttttttttttttttttttttt

SEQ ID NO: 8202 - DNA, 84 bp, synthetic construct
  source 1..84: mol_type = other DNA
tttttttaagcagtggtatcaacgcagagtacnntagtagccnnagctggtanntttttttttttttttttttttttttttttt

SEQ ID NO: 8203 - DNA, 84 bp, synthetic construct
  source 1..84: mol_type = other DNA
tttttttaagcagtggtatcaacgcagagtacnntagtagccnnaactaggcnntttttttttttttttttttttttttttttt

SEQ ID NO: 8204 - DNA, 84 bp, synthetic construct
  source 1..84: mol_type = other DNA
tttttttaagcagtggtatcaacgcagagtacnntagtagccnncagcaagtnntttttttttttttttttttttttttttttt

SEQ ID NO: 8205 - DNA, 84 bp, synthetic construct
  source 1..84: mol_type = other DNA
tttttttaagcagtggtatcaacgcagagtacnntagtagccnnacgaggtanntttttttttttttttttttttttttttttt

SEQ ID NO: 8206 - DNA, 84 bp, synthetic construct
  source 1..84: mol_type = other DNA
tttttttaagcagtggtatcaacgcagagtacnntagtagccnncatcttccnntttttttttttttttttttttttttttttt

SEQ ID NO: 8207 - DNA, 84 bp, synthetic construct
  source 1..84: mol_type = other DNA
tttttttaagcagtggtatcaacgcagagtacnntagtagccnncctgaatcnntttttttttttttttttttttttttttttt

SEQ ID NO: 8208 - DNA, 84 bp, synthetic construct
  source 1..84: mol_type = other DNA
tttttttaagcagtggtatcaacgcagagtacnntagtagccnntgcagactnntttttttttttttttttttttttttttttt

SEQ ID NO: 8209 - DNA, 84 bp, synthetic construct
  source 1..84: mol_type = other DNA
tttttttaagcagtggtatcaacgcagagtacnntagtagccnnagatgtggnntttttttttttttttttttttttttttttt

SEQ ID NO: 8210 - DNA, 84 bp, synthetic construct
  source 1..84: mol_type = other DNA
tttttttaagcagtggtatcaacgcagagtacnntagtagccnnagttcgacnntttttttttttttttttttttttttttttt

SEQ ID NO: 8211 - DNA, 84 bp, synthetic construct
  source 1..84: mol_type = other DNA
tttttttaagcagtggtatcaacgcagagtacnntagtagccnnacaacctcnntttttttttttttttttttttttttttttt

SEQ ID NO: 8212 - DNA, 84 bp, synthetic construct
  source 1..84: mol_type = other DNA
tttttttaagcagtggtatcaacgcagagtacnntagtagccnncatggtagnntttttttttttttttttttttttttttttt

SEQ ID NO: 8213 - DNA, 84 bp, synthetic construct
  source 1..84: mol_type = other DNA
tttttttaagcagtggtatcaacgcagagtacnntagtagccnncgtatctcnntttttttttttttttttttttttttttttt

SEQ ID NO: 8214 - DNA, 84 bp, synthetic construct
  source 1..84: mol_type = other DNA
tttttttaagcagtggtatcaacgcagagtacnntagtagccnncctagttcnntttttttttttttttttttttttttttttt

SEQ ID NO: 8215 - DNA, 84 bp, synthetic construct
  source 1..84: mol_type = other DNA
tttttttaagcagtggtatcaacgcagagtacnntagtagccnncaagagtcnntttttttttttttttttttttttttttttt

SEQ ID NO: 8216 - DNA, 84 bp, synthetic construct
  source 1..84: mol_type = other DNA
tttttttaagcagtggtatcaacgcagagtacnngagatcagnnaatcggcanntttttttttttttttttttttttttttttt

SEQ ID NO: 8217 - DNA, 84 bp, synthetic construct
  source 1..84: mol_type = other DNA
tttttttaagcagtggtatcaacgcagagtacnngagatcagnntacggcatnntttttttttttttttttttttttttttttt

SEQ ID NO: 8218 - DNA, 84 bp, synthetic construct
  source 1..84: mol_type = other DNA
tttttttaagcagtggtatcaacgcagagtacnngagatcagnnttggatcgnntttttttttttttttttttttttttttttt

SEQ ID NO: 8219 - DNA, 84 bp, synthetic construct
  source 1..84: mol_type = other DNA
tttttttaagcagtggtatcaacgcagagtacnngagatcagnntggaacganntttttttttttttttttttttttttttttt

SEQ ID NO: 8220 - DNA, 84 bp, synthetic construct
  source 1..84: mol_type = other DNA
tttttttaagcagtggtatcaacgcagagtacnngagatcagnnggcaatcanntttttttttttttttttttttttttttttt

SEQ ID NO: 8221 - DNA, 84 bp, synthetic construct
  source 1..84: mol_type = other DNA
tttttttaagcagtggtatcaacgcagagtacnngagatcagnngaatccganntttttttttttttttttttttttttttttt

SEQ ID NO: 8222 - DNA, 84 bp, synthetic construct
  source 1..84: mol_type = other DNA
tttttttaagcagtggtatcaacgcagagtacnngagatcagnnttacggtgnntttttttttttttttttttttttttttttt

SEQ ID NO: 8223 - DNA, 84 bp, synthetic construct
  source 1..84: mol_type = other DNA
tttttttaagcagtggtatcaacgcagagtacnngagatcagnncatatcggnntttttttttttttttttttttttttttttt

SEQ ID NO: 8224 - DNA, 84 bp, synthetic construct
  source 1..84: mol_type = other DNA
tttttttaagcagtggtatcaacgcagagtacnngagatcagnncttcggtanntttttttttttttttttttttttttttttt

SEQ ID NO: 8225 - DNA, 84 bp, synthetic construct
  source 1..84: mol_type = other DNA
tttttttaagcagtggtatcaacgcagagtacnngagatcagnntcctaacgnntttttttttttttttttttttttttttttt

SEQ ID NO: 8226 - DNA, 84 bp, synthetic construct
  source 1..84: mol_type = other DNA
tttttttaagcagtggtatcaacgcagagtacnngagatcagnngtaagccanntttttttttttttttttttttttttttttt

SEQ ID NO: 8227 - DNA, 84 bp, synthetic construct
  source 1..84: mol_type = other DNA
tttttttaagcagtggtatcaacgcagagtacnngagatcagnntaaggtggnntttttttttttttttttttttttttttttt

SEQ ID NO: 8228 - DNA, 84 bp, synthetic construct
  source 1..84: mol_type = other DNA
tttttttaagcagtggtatcaacgcagagtacnngagatcagnnggtaagctnntttttttttttttttttttttttttttttt

SEQ ID NO: 8229 - DNA, 84 bp, synthetic construct
  source 1..84: mol_type = other DNA
tttttttaagcagtggtatcaacgcagagtacnngagatcagnntgtgtcganntttttttttttttttttttttttttttttt

SEQ ID NO: 8230 - DNA, 84 bp, synthetic construct
  source 1..84: mol_type = other DNA
tttttttaagcagtggtatcaacgcagagtacnngagatcagnngagcatganntttttttttttttttttttttttttttttt

SEQ ID NO: 8231 - DNA, 84 bp, synthetic construct
  source 1..84: mol_type = other DNA
tttttttaagcagtggtatcaacgcagagtacnngagatcagnntcgaagtcnntttttttttttttttttttttttttttttt

SEQ ID NO: 8232 - DNA, 84 bp, synthetic construct
  source 1..84: mol_type = other DNA
tttttttaagcagtggtatcaacgcagagtacnngagatcagnnggtgaacanntttttttttttttttttttttttttttttt

SEQ ID NO: 8233 - DNA, 84 bp, synthetic construct
  source 1..84: mol_type = other DNA
tttttttaagcagtggtatcaacgcagagtacnngagatcagnnacatgcacnntttttttttttttttttttttttttttttt

SEQ ID NO: 8234 - DNA, 84 bp, synthetic construct
  source 1..84: mol_type = other DNA
tttttttaagcagtggtatcaacgcagagtacnngagatcagnnccaacagtnntttttttttttttttttttttttttttttt

SEQ ID NO: 8235 - DNA, 84 bp, synthetic construct
  source 1..84: mol_type = other DNA
tttttttaagcagtggtatcaacgcagagtacnngagatcagnnagaacagcnntttttttttttttttttttttttttttttt

SEQ ID NO: 8236 - DNA, 84 bp, synthetic construct
  source 1..84: mol_type = other DNA
tttttttaagcagtggtatcaacgcagagtacnngagatcagnngaacacgtnntttttttttttttttttttttttttttttt

SEQ ID NO: 8237 - DNA, 84 bp, synthetic construct
  source 1..84: mol_type = other DNA
tttttttaagcagtggtatcaacgcagagtacnngagatcagnnggtcttcanntttttttttttttttttttttttttttttt

SEQ ID NO: 8238 - DNA, 84 bp, synthetic construct
  source 1..84: mol_type = other DNA
tttttttaagcagtggtatcaacgcagagtacnngagatcagnnaggttcagnntttttttttttttttttttttttttttttt

SEQ ID NO: 8239 - DNA, 84 bp, synthetic construct
  source 1..84: mol_type = other DNA
tttttttaagcagtggtatcaacgcagagtacnngagatcagnnctagagcanntttttttttttttttttttttttttttttt

SEQ ID NO: 8240 - DNA, 84 bp, synthetic construct
  source 1..84: mol_type = other DNA
tttttttaagcagtggtatcaacgcagagtacnngagatcagnncttctagcnntttttttttttttttttttttttttttttt

SEQ ID NO: 8241 - DNA, 84 bp, synthetic construct
  source 1..84: mol_type = other DNA
tttttttaagcagtggtatcaacgcagagtacnngagatcagnngagtaacgnntttttttttttttttttttttttttttttt

SEQ ID NO: 8242 - DNA, 84 bp, synthetic construct
  source 1..84: mol_type = other DNA
tttttttaagcagtggtatcaacgcagagtacnngagatcagnnctaagaggnntttttttttttttttttttttttttttttt

SEQ ID NO: 8243 - DNA, 84 bp, synthetic construct
  source 1..84: mol_type = other DNA
tttttttaagcagtggtatcaacgcagagtacnngagatcagnnacgtgtagnntttttttttttttttttttttttttttttt

SEQ ID NO: 8244 - DNA, 84 bp, synthetic construct
  source 1..84: mol_type = other DNA
tttttttaagcagtggtatcaacgcagagtacnngagatcagnnactacaggnntttttttttttttttttttttttttttttt

SEQ ID NO: 8245 - DNA, 84 bp, synthetic construct
  source 1..84: mol_type = other DNA
tttttttaagcagtggtatcaacgcagagtacnngagatcagnntacaggtcnntttttttttttttttttttttttttttttt

SEQ ID NO: 8246 - DNA, 84 bp, synthetic construct
  source 1..84: mol_type = other DNA
tttttttaagcagtggtatcaacgcagagtacnngagatcagnnctcacatgnntttttttttttttttttttttttttttttt

SEQ ID NO: 8247 - DNA, 84 bp, synthetic construct
  source 1..84: mol_type = other DNA
tttttttaagcagtggtatcaacgcagagtacnngagatcagnnactaggagnntttttttttttttttttttttttttttttt

SEQ ID NO: 8248 - DNA, 84 bp, synthetic construct
  source 1..84: mol_type = other DNA
tttttttaagcagtggtatcaacgcagagtacnngagatcagnnccatagganntttttttttttttttttttttttttttttt

SEQ ID NO: 8249 - DNA, 84 bp, synthetic construct
  source 1..84: mol_type = other DNA
tttttttaagcagtggtatcaacgcagagtacnngagatcagnnggagaatcnntttttttttttttttttttttttttttttt

SEQ ID NO: 8250 - DNA, 84 bp, synthetic construct
  source 1..84: mol_type = other DNA
tttttttaagcagtggtatcaacgcagagtacnngagatcagnngccaagaanntttttttttttttttttttttttttttttt

SEQ ID NO: 8251 - DNA, 84 bp, synthetic construct
  source 1..84: mol_type = other DNA
tttttttaagcagtggtatcaacgcagagtacnngagatcagnnaaggcaagnntttttttttttttttttttttttttttttt

SEQ ID NO: 8252 - DNA, 84 bp, synthetic construct
  source 1..84: mol_type = other DNA
tttttttaagcagtggtatcaacgcagagtacnngagatcagnnaatgtcgcnntttttttttttttttttttttttttttttt

SEQ ID NO: 8253 - DNA, 84 bp, synthetic construct
  source 1..84: mol_type = other DNA
tttttttaagcagtggtatcaacgcagagtacnngagatcagnnatggaaccnntttttttttttttttttttttttttttttt

SEQ ID NO: 8254 - DNA, 84 bp, synthetic construct
  source 1..84: mol_type = other DNA
tttttttaagcagtggtatcaacgcagagtacnngagatcagnnagaggcatnntttttttttttttttttttttttttttttt

SEQ ID NO: 8255 - DNA, 84 bp, synthetic construct
  source 1..84: mol_type = other DNA
tttttttaagcagtggtatcaacgcagagtacnngagatcagnntgcatagcnntttttttttttttttttttttttttttttt

SEQ ID NO: 8256 - DNA, 84 bp, synthetic construct
  source 1..84: mol_type = other DNA
tttttttaagcagtggtatcaacgcagagtacnngagatcagnnctaacgganntttttttttttttttttttttttttttttt

SEQ ID NO: 8257 - DNA, 84 bp, synthetic construct
  source 1..84: mol_type = other DNA
tttttttaagcagtggtatcaacgcagagtacnngagatcagnntatcgaggnntttttttttttttttttttttttttttttt

SEQ ID NO: 8258 - DNA, 84 bp, synthetic construct
  source 1..84: mol_type = other DNA
tttttttaagcagtggtatcaacgcagagtacnngagatcagnncatagcctnntttttttttttttttttttttttttttttt

SEQ ID NO: 8259 - DNA, 84 bp, synthetic construct
  source 1..84: mol_type = other DNA
tttttttaagcagtggtatcaacgcagagtacnngagatcagnnatcgagacnntttttttttttttttttttttttttttttt

SEQ ID NO: 8260 - DNA, 84 bp, synthetic construct
  source 1..84: mol_type = other DNA
tttttttaagcagtggtatcaacgcagagtacnngagatcagnnggaagagtnntttttttttttttttttttttttttttttt

SEQ ID NO: 8261 - DNA, 84 bp, synthetic construct
  source 1..84: mol_type = other DNA
tttttttaagcagtggtatcaacgcagagtacnngagatcagnnccaagtagnntttttttttttttttttttttttttttttt

SEQ ID NO: 8262 - DNA, 84 bp, synthetic construct
  source 1..84: mol_type = other DNA
tttttttaagcagtggtatcaacgcagagtacnngagatcagnnctgaacagnntttttttttttttttttttttttttttttt

SEQ ID NO: 8263 - DNA, 84 bp, synthetic construct
  source 1..84: mol_type = other DNA
tttttttaagcagtggtatcaacgcagagtacnngagatcagnngtaggttcnntttttttttttttttttttttttttttttt

SEQ ID NO: 8264 - DNA, 84 bp, synthetic construct
  source 1..84: mol_type = other DNA
tttttttaagcagtggtatcaacgcagagtacnngagatcagnngtatggacnntttttttttttttttttttttttttttttt

SEQ ID NO: 8265 - DNA, 84 bp, synthetic construct
  source 1..84: mol_type = other DNA
tttttttaagcagtggtatcaacgcagagtacnngagatcagnntcgcaacanntttttttttttttttttttttttttttttt

SEQ ID NO: 8266 - DNA, 84 bp, synthetic construct
  source 1..84: mol_type = other DNA
tttttttaagcagtggtatcaacgcagagtacnngagatcagnnccgctaatnntttttttttttttttttttttttttttttt

SEQ ID NO: 8267 - DNA, 84 bp, synthetic construct
  source 1..84: mol_type = other DNA
tttttttaagcagtggtatcaacgcagagtacnngagatcagnngattcgcanntttttttttttttttttttttttttttttt

SEQ ID NO: 8268 - DNA, 84 bp, synthetic construct
  source 1..84: mol_type = other DNA
tttttttaagcagtggtatcaacgcagagtacnngagatcagnncgatggaanntttttttttttttttttttttttttttttt

SEQ ID NO: 8269 - DNA, 84 bp, synthetic construct
  source 1..84: mol_type = other DNA
tttttttaagcagtggtatcaacgcagagtacnngagatcagnnagcaagganntttttttttttttttttttttttttttttt

SEQ ID NO: 8270 - DNA, 84 bp, synthetic construct
  source 1..84: mol_type = other DNA
tttttttaagcagtggtatcaacgcagagtacnngagatcagnncgtagcaanntttttttttttttttttttttttttttttt

SEQ ID NO: 8271 - DNA, 84 bp, synthetic construct
  source 1..84: mol_type = other DNA
tttttttaagcagtggtatcaacgcagagtacnngagatcagnntggcagtanntttttttttttttttttttttttttttttt

SEQ ID NO: 8272 - DNA, 84 bp, synthetic construct
  source 1..84: mol_type = other DNA
tttttttaagcagtggtatcaacgcagagtacnngagatcagnncggtagttnntttttttttttttttttttttttttttttt

SEQ ID NO: 8273 - DNA, 84 bp, synthetic construct
  source 1..84: mol_type = other DNA
tttttttaagcagtggtatcaacgcagagtacnngagatcagnntgacttcgnntttttttttttttttttttttttttttttt

SEQ ID NO: 8274 - DNA, 84 bp, synthetic construct
  source 1..84: mol_type = other DNA
tttttttaagcagtggtatcaacgcagagtacnngagatcagnngagtgcaanntttttttttttttttttttttttttttttt

SEQ ID NO: 8275 - DNA, 84 bp, synthetic construct
  source 1..84: mol_type = other DNA
tttttttaagcagtggtatcaacgcagagtacnngagatcagnnacggtaacnntttttttttttttttttttttttttttttt

SEQ ID NO: 8276 - DNA, 84 bp, synthetic construct
  source 1..84: mol_type = other DNA
tttttttaagcagtggtatcaacgcagagtacnngagatcagnnaagtggtgnntttttttttttttttttttttttttttttt

SEQ ID NO: 8277 - DNA, 84 bp, synthetic construct
  source 1..84: mol_type = other DNA
tttttttaagcagtggtatcaacgcagagtacnngagatcagnnggagacaanntttttttttttttttttttttttttttttt

SEQ ID NO: 8278 - DNA, 84 bp, synthetic construct
  source 1..84: mol_type = other DNA
tttttttaagcagtggtatcaacgcagagtacnngagatcagnntcaaggacnntttttttttttttttttttttttttttttt

SEQ ID NO: 8279 - DNA, 84 bp, synthetic construct
  source 1..84: mol_type = other DNA
tttttttaagcagtggtatcaacgcagagtacnngagatcagnnaagagagcnntttttttttttttttttttttttttttttt

SEQ ID NO: 8280 - DNA, 84 bp, synthetic construct
  source 1..84: mol_type = other DNA
tttttttaagcagtggtatcaacgcagagtacnngagatcagnncgagagatnntttttttttttttttttttttttttttttt

SEQ ID NO: 8281 - DNA, 84 bp, synthetic construct
  source 1..84: mol_type = other DNA
tttttttaagcagtggtatcaacgcagagtacnngagatcagnnacagatggnntttttttttttttttttttttttttttttt

SEQ ID NO: 8282 - DNA, 84 bp, synthetic construct
  source 1..84: mol_type = other DNA
tttttttaagcagtggtatcaacgcagagtacnngagatcagnnaggagtcanntttttttttttttttttttttttttttttt

SEQ ID NO: 8283 - DNA, 84 bp, synthetic construct
  source 1..84: mol_type = other DNA
tttttttaagcagtggtatcaacgcagagtacnngagatcagnncgtgttacnntttttttttttttttttttttttttttttt

SEQ ID NO: 8284 - DNA, 84 bp, synthetic construct
  source 1..84: mol_type = other DNA
tttttttaagcagtggtatcaacgcagagtacnngagatcagnntagtgtgcnntttttttttttttttttttttttttttttt

SEQ ID NO: 8285 - DNA, 84 bp, synthetic construct
  source 1..84: mol_type = other DNA
tttttttaagcagtggtatcaacgcagagtacnngagatcagnnctcatgacnntttttttttttttttttttttttttttttt

SEQ ID NO: 8286 - DNA, 84 bp, synthetic construct
  source 1..84: mol_type = other DNA
tttttttaagcagtggtatcaacgcagagtacnngagatcagnngtatccagnntttttttttttttttttttttttttttttt

SEQ ID NO: 8287 - DNA, 84 bp, synthetic construct
  source 1..84: mol_type = other DNA
tttttttaagcagtggtatcaacgcagagtacnngagatcagnnacgcctatnntttttttttttttttttttttttttttttt

SEQ ID NO: 8288 - DNA, 84 bp, synthetic construct
  source 1..84: mol_type = other DNA
tttttttaagcagtggtatcaacgcagagtacnngagatcagnnaacgacctnntttttttttttttttttttttttttttttt

SEQ ID NO: 8289 - DNA, 84 bp, synthetic construct
  source 1..84: mol_type = other DNA
tttttttaagcagtggtatcaacgcagagtacnngagatcagnnatcaggctnntttttttttttttttttttttttttttttt

SEQ ID NO: 8290 - DNA, 84 bp, synthetic construct
  source 1..84: mol_type = other DNA
tttttttaagcagtggtatcaacgcagagtacnngagatcagnncaagttcgnntttttttttttttttttttttttttttttt

SEQ ID NO: 8291 - DNA, 84 bp, synthetic construct
  source 1..84: mol_type = other DNA
tttttttaagcagtggtatcaacgcagagtacnngagatcagnntagccaganntttttttttttttttttttttttttttttt

SEQ ID NO: 8292 - DNA, 84 bp, synthetic construct
  source 1..84: mol_type = other DNA
tttttttaagcagtggtatcaacgcagagtacnngagatcagnncaatcacgnntttttttttttttttttttttttttttttt

SEQ ID NO: 8293 - DNA, 84 bp, synthetic construct
  source 1..84: mol_type = other DNA
tttttttaagcagtggtatcaacgcagagtacnngagatcagnngcaacaagnntttttttttttttttttttttttttttttt

SEQ ID NO: 8294 - DNA, 84 bp, synthetic construct
  source 1..84: mol_type = other DNA
tttttttaagcagtggtatcaacgcagagtacnngagatcagnncacgacaanntttttttttttttttttttttttttttttt

SEQ ID NO: 8295 - DNA, 84 bp, synthetic construct
  source 1..84: mol_type = other DNA
tttttttaagcagtggtatcaacgcagagtacnngagatcagnntacggaganntttttttttttttttttttttttttttttt

SEQ ID NO: 8296 - DNA, 84 bp, synthetic construct
  source 1..84: mol_type = other DNA
tttttttaagcagtggtatcaacgcagagtacnngagatcagnncgacaaganntttttttttttttttttttttttttttttt

SEQ ID NO: 8297 - DNA, 84 bp, synthetic construct
  source 1..84: mol_type = other DNA
tttttttaagcagtggtatcaacgcagagtacnngagatcagnncgaagtganntttttttttttttttttttttttttttttt

SEQ ID NO: 8298 - DNA, 84 bp, synthetic construct
  source 1..84: mol_type = other DNA
tttttttaagcagtggtatcaacgcagagtacnngagatcagnnagctggtanntttttttttttttttttttttttttttttt

SEQ ID NO: 8299 - DNA, 84 bp, synthetic construct
  source 1..84: mol_type = other DNA
tttttttaagcagtggtatcaacgcagagtacnngagatcagnnaactaggcnntttttttttttttttttttttttttttttt

SEQ ID NO: 8300 - DNA, 84 bp, synthetic construct
  source 1..84: mol_type = other DNA
tttttttaagcagtggtatcaacgcagagtacnngagatcagnncagcaagtnntttttttttttttttttttttttttttttt

SEQ ID NO: 8301 - DNA, 84 bp, synthetic construct
  source 1..84: mol_type = other DNA
tttttttaagcagtggtatcaacgcagagtacnngagatcagnnacgaggtanntttttttttttttttttttttttttttttt

SEQ ID NO: 8302 - DNA, 84 bp, synthetic construct
  source 1..84: mol_type = other DNA
tttttttaagcagtggtatcaacgcagagtacnngagatcagnncatcttccnntttttttttttttttttttttttttttttt

SEQ ID NO: 8303 - DNA, 84 bp, synthetic construct
  source 1..84: mol_type = other DNA
tttttttaagcagtggtatcaacgcagagtacnngagatcagnncctgaatcnntttttttttttttttttttttttttttttt

SEQ ID NO: 8304 - DNA, 84 bp, synthetic construct
  source 1..84: mol_type = other DNA
tttttttaagcagtggtatcaacgcagagtacnngagatcagnntgcagactnntttttttttttttttttttttttttttttt

SEQ ID NO: 8305 - DNA, 84 bp, synthetic construct
  source 1..84: mol_type = other DNA
tttttttaagcagtggtatcaacgcagagtacnngagatcagnnagatgtggnntttttttttttttttttttttttttttttt

SEQ ID NO: 8306 - DNA, 84 bp, synthetic construct
  source 1..84: mol_type = other DNA
tttttttaagcagtggtatcaacgcagagtacnngagatcagnnagttcgacnntttttttttttttttttttttttttttttt

SEQ ID NO: 8307 - DNA, 84 bp, synthetic construct
  source 1..84: mol_type = other DNA
tttttttaagcagtggtatcaacgcagagtacnngagatcagnnacaacctcnntttttttttttttttttttttttttttttt

SEQ ID NO: 8308 - DNA, 84 bp, synthetic construct
  source 1..84: mol_type = other DNA
tttttttaagcagtggtatcaacgcagagtacnngagatcagnncatggtagnntttttttttttttttttttttttttttttt

SEQ ID NO: 8309 - DNA, 84 bp, synthetic construct
  source 1..84: mol_type = other DNA
tttttttaagcagtggtatcaacgcagagtacnngagatcagnncgtatctcnntttttttttttttttttttttttttttttt

SEQ ID NO: 8310 - DNA, 84 bp, synthetic construct
  source 1..84: mol_type = other DNA
tttttttaagcagtggtatcaacgcagagtacnngagatcagnncctagttcnntttttttttttttttttttttttttttttt

SEQ ID NO: 8311 - DNA, 84 bp, synthetic construct
  source 1..84: mol_type = other DNA
tttttttaagcagtggtatcaacgcagagtacnngagatcagnncaagagtcnntttttttttttttttttttttttttttttt

SEQ ID NO: 8312 - DNA, 84 bp, synthetic construct
  source 1..84: mol_type = other DNA
tttttttaagcagtggtatcaacgcagagtacnntgaaggcannaatcggcanntttttttttttttttttttttttttttttt

SEQ ID NO: 8313 - DNA, 84 bp, synthetic construct
  source 1..84: mol_type = other DNA
tttttttaagcagtggtatcaacgcagagtacnntgaaggcanntacggcatnntttttttttttttttttttttttttttttt

SEQ ID NO: 8314 - DNA, 84 bp, synthetic construct
  source 1..84: mol_type = other DNA
tttttttaagcagtggtatcaacgcagagtacnntgaaggcannttggatcgnntttttttttttttttttttttttttttttt

SEQ ID NO: 8315 - DNA, 84 bp, synthetic construct
  source 1..84: mol_type = other DNA
tttttttaagcagtggtatcaacgcagagtacnntgaaggcanntggaacganntttttttttttttttttttttttttttttt

SEQ ID NO: 8316 - DNA, 84 bp, synthetic construct
  source 1..84: mol_type = other DNA
tttttttaagcagtggtatcaacgcagagtacnntgaaggcannggcaatcanntttttttttttttttttttttttttttttt

SEQ ID NO: 8317 - DNA, 84 bp, synthetic construct
  source 1..84: mol_type = other DNA
tttttttaagcagtggtatcaacgcagagtacnntgaaggcanngaatccganntttttttttttttttttttttttttttttt

SEQ ID NO: 8318 - DNA, 84 bp, synthetic construct
  source 1..84: mol_type = other DNA
tttttttaagcagtggtatcaacgcagagtacnntgaaggcannttacggtgnntttttttttttttttttttttttttttttt

SEQ ID NO: 8319 - DNA, 84 bp, synthetic construct
  source 1..84: mol_type = other DNA
tttttttaagcagtggtatcaacgcagagtacnntgaaggcanncatatcggnntttttttttttttttttttttttttttttt

SEQ ID NO: 8320 - DNA, 84 bp, synthetic construct
  source 1..84: mol_type = other DNA
tttttttaagcagtggtatcaacgcagagtacnntgaaggcanncttcggtanntttttttttttttttttttttttttttttt

SEQ ID NO: 8321 - DNA, 84 bp, synthetic construct
  source 1..84: mol_type = other DNA
tttttttaagcagtggtatcaacgcagagtacnntgaaggcanntcctaacgnntttttttttttttttttttttttttttttt

SEQ ID NO: 8322 - DNA, 84 bp, synthetic construct
  source 1..84: mol_type = other DNA
tttttttaagcagtggtatcaacgcagagtacnntgaaggcanngtaagccanntttttttttttttttttttttttttttttt

SEQ ID NO: 8323 - DNA, 84 bp, synthetic construct
  source 1..84: mol_type = other DNA
tttttttaagcagtggtatcaacgcagagtacnntgaaggcanntaaggtggnntttttttttttttttttttttttttttttt

SEQ ID NO: 8324 - DNA, 84 bp, synthetic construct
  source 1..84: mol_type = other DNA
tttttttaagcagtggtatcaacgcagagtacnntgaaggcannggtaagctnntttttttttttttttttttttttttttttt

SEQ ID NO: 8325 - DNA, 84 bp, synthetic construct
  source 1..84: mol_type = other DNA
tttttttaagcagtggtatcaacgcagagtacnntgaaggcanntgtgtcganntttttttttttttttttttttttttttttt

SEQ ID NO: 8326 - DNA, 84 bp, synthetic construct
  source 1..84: mol_type = other DNA
tttttttaagcagtggtatcaacgcagagtacnntgaaggcanngagcatganntttttttttttttttttttttttttttttt

SEQ ID NO: 8327 - DNA, 84 bp, synthetic construct
  source 1..84: mol_type = other DNA
tttttttaagcagtggtatcaacgcagagtacnntgaaggcanntcgaagtcnntttttttttttttttttttttttttttttt

SEQ ID NO: 8328 - DNA, 84 bp, synthetic construct
  source 1..84: mol_type = other DNA
tttttttaagcagtggtatcaacgcagagtacnntgaaggcannggtgaacanntttttttttttttttttttttttttttttt

SEQ ID NO: 8329 - DNA, 84 bp, synthetic construct
  source 1..84: mol_type = other DNA
tttttttaagcagtggtatcaacgcagagtacnntgaaggcannacatgcacnntttttttttttttttttttttttttttttt

SEQ ID NO: 8330 - DNA, 84 bp, synthetic construct
  source 1..84: mol_type = other DNA
tttttttaagcagtggtatcaacgcagagtacnntgaaggcannccaacagtnntttttttttttttttttttttttttttttt

SEQ ID NO: 8331 - DNA, 84 bp, synthetic construct
  source 1..84: mol_type = other DNA
tttttttaagcagtggtatcaacgcagagtacnntgaaggcannagaacagcnntttttttttttttttttttttttttttttt

SEQ ID NO: 8332 - DNA, 84 bp, synthetic construct
  source 1..84: mol_type = other DNA
tttttttaagcagtggtatcaacgcagagtacnntgaaggcanngaacacgtnntttttttttttttttttttttttttttttt

SEQ ID NO: 8333 - DNA, 84 bp, synthetic construct
  source 1..84: mol_type = other DNA
tttttttaagcagtggtatcaacgcagagtacnntgaaggcannggtcttcanntttttttttttttttttttttttttttttt

SEQ ID NO: 8334 - DNA, 84 bp, synthetic construct
  source 1..84: mol_type = other DNA
tttttttaagcagtggtatcaacgcagagtacnntgaaggcannaggttcagnntttttttttttttttttttttttttttttt

SEQ ID NO: 8335 - DNA, 84 bp, synthetic construct
  source 1..84: mol_type = other DNA
tttttttaagcagtggtatcaacgcagagtacnntgaaggcannctagagcanntttttttttttttttttttttttttttttt

SEQ ID NO: 8336 - DNA, 84 bp, synthetic construct
  source 1..84: mol_type = other DNA
tttttttaagcagtggtatcaacgcagagtacnntgaaggcanncttctagcnntttttttttttttttttttttttttttttt

SEQ ID NO: 8337 - DNA, 84 bp, synthetic construct
  source 1..84: mol_type = other DNA
tttttttaagcagtggtatcaacgcagagtacnntgaaggcanngagtaacgnntttttttttttttttttttttttttttttt

SEQ ID NO: 8338 - DNA, 84 bp, synthetic construct
  source 1..84: mol_type = other DNA
tttttttaagcagtggtatcaacgcagagtacnntgaaggcannctaagaggnntttttttttttttttttttttttttttttt

SEQ ID NO: 8339 - DNA, 84 bp, synthetic construct
  source 1..84: mol_type = other DNA
tttttttaagcagtggtatcaacgcagagtacnntgaaggcannacgtgtagnntttttttttttttttttttttttttttttt

SEQ ID NO: 8340 - DNA, 84 bp, synthetic construct
  source 1..84: mol_type = other DNA
tttttttaagcagtggtatcaacgcagagtacnntgaaggcannactacaggnntttttttttttttttttttttttttttttt

SEQ ID NO: 8341 - DNA, 84 bp, synthetic construct
  source 1..84: mol_type = other DNA
tttttttaagcagtggtatcaacgcagagtacnntgaaggcanntacaggtcnntttttttttttttttttttttttttttttt

SEQ ID NO: 8342 - DNA, 84 bp, synthetic construct
  source 1..84: mol_type = other DNA
tttttttaagcagtggtatcaacgcagagtacnntgaaggcannctcacatgnntttttttttttttttttttttttttttttt

SEQ ID NO: 8343 - DNA, 84 bp, synthetic construct
  source 1..84: mol_type = other DNA
tttttttaagcagtggtatcaacgcagagtacnntgaaggcannactaggagnntttttttttttttttttttttttttttttt

SEQ ID NO: 8344 - DNA, 84 bp, synthetic construct
  source 1..84: mol_type = other DNA
tttttttaagcagtggtatcaacgcagagtacnntgaaggcannccatagganntttttttttttttttttttttttttttttt

SEQ ID NO: 8345 - DNA, 84 bp, synthetic construct
  source 1..84: mol_type = other DNA
tttttttaagcagtggtatcaacgcagagtacnntgaaggcannggagaatcnntttttttttttttttttttttttttttttt

SEQ ID NO: 8346 - DNA, 84 bp, synthetic construct
  source 1..84: mol_type = other DNA
tttttttaagcagtggtatcaacgcagagtacnntgaaggcanngccaagaanntttttttttttttttttttttttttttttt

SEQ ID NO: 8347 - DNA, 84 bp, synthetic construct
  source 1..84: mol_type = other DNA
tttttttaagcagtggtatcaacgcagagtacnntgaaggcannaaggcaagnntttttttttttttttttttttttttttttt

SEQ ID NO: 8348 - DNA, 84 bp, synthetic construct
  source 1..84: mol_type = other DNA
tttttttaagcagtggtatcaacgcagagtacnntgaaggcannaatgtcgcnntttttttttttttttttttttttttttttt

SEQ ID NO: 8349 - DNA, 84 bp, synthetic construct
  source 1..84: mol_type = other DNA
tttttttaagcagtggtatcaacgcagagtacnntgaaggcannatggaaccnntttttttttttttttttttttttttttttt

SEQ ID NO: 8350 - DNA, 84 bp, synthetic construct
  source 1..84: mol_type = other DNA
tttttttaagcagtggtatcaacgcagagtacnntgaaggcannagaggcatnntttttttttttttttttttttttttttttt

SEQ ID NO: 8351 - DNA, 84 bp, synthetic construct
  source 1..84: mol_type = other DNA
tttttttaagcagtggtatcaacgcagagtacnntgaaggcanntgcatagcnntttttttttttttttttttttttttttttt

SEQ ID NO: 8352 - DNA, 84 bp, synthetic construct
  source 1..84: mol_type = other DNA
tttttttaagcagtggtatcaacgcagagtacnntgaaggcannctaacgganntttttttttttttttttttttttttttttt

SEQ ID NO: 8353 - DNA, 84 bp, synthetic construct
  source 1..84: mol_type = other DNA
tttttttaagcagtggtatcaacgcagagtacnntgaaggcanntatcgaggnntttttttttttttttttttttttttttttt

SEQ ID NO: 8354 - DNA, 84 bp, synthetic construct
  source 1..84: mol_type = other DNA
tttttttaagcagtggtatcaacgcagagtacnntgaaggcanncatagcctnntttttttttttttttttttttttttttttt

SEQ ID NO: 8355 - DNA, 84 bp, synthetic construct
  source 1..84: mol_type = other DNA
tttttttaagcagtggtatcaacgcagagtacnntgaaggcannatcgagacnntttttttttttttttttttttttttttttt

SEQ ID NO: 8356 - DNA, 84 bp, synthetic construct
  source 1..84: mol_type = other DNA
tttttttaagcagtggtatcaacgcagagtacnntgaaggcannggaagagtnntttttttttttttttttttttttttttttt

SEQ ID NO: 8357 - DNA, 84 bp, synthetic construct
  source 1..84: mol_type = other DNA
tttttttaagcagtggtatcaacgcagagtacnntgaaggcannccaagtagnntttttttttttttttttttttttttttttt

SEQ ID NO: 8358 - DNA, 84 bp, synthetic construct
  source 1..84: mol_type = other DNA
tttttttaagcagtggtatcaacgcagagtacnntgaaggcannctgaacagnntttttttttttttttttttttttttttttt

SEQ ID NO: 8359 - DNA, 84 bp, synthetic construct
  source 1..84: mol_type = other DNA
tttttttaagcagtggtatcaacgcagagtacnntgaaggcanngtaggttcnntttttttttttttttttttttttttttttt

SEQ ID NO: 8360 - DNA, 84 bp, synthetic construct
  source 1..84: mol_type = other DNA
tttttttaagcagtggtatcaacgcagagtacnntgaaggcanngtatggacnntttttttttttttttttttttttttttttt

SEQ ID NO: 8361 - DNA, 84 bp, synthetic construct
  source 1..84: mol_type = other DNA
tttttttaagcagtggtatcaacgcagagtacnntgaaggcanntcgcaacanntttttttttttttttttttttttttttttt

SEQ ID NO: 8362 - DNA, 84 bp, synthetic construct
  source 1..84: mol_type = other DNA
tttttttaagcagtggtatcaacgcagagtacnntgaaggcannccgctaatnntttttttttttttttttttttttttttttt

SEQ ID NO: 8363 - DNA, 84 bp, synthetic construct
  source 1..84: mol_type = other DNA
tttttttaagcagtggtatcaacgcagagtacnntgaaggcanngattcgcanntttttttttttttttttttttttttttttt

SEQ ID NO: 8364 - DNA, 84 bp, synthetic construct
  source 1..84: mol_type = other DNA
tttttttaagcagtggtatcaacgcagagtacnntgaaggcanncgatggaanntttttttttttttttttttttttttttttt

SEQ ID NO: 8365 - DNA, 84 bp, synthetic construct
  source 1..84: mol_type = other DNA
tttttttaagcagtggtatcaacgcagagtacnntgaaggcannagcaagganntttttttttttttttttttttttttttttt

SEQ ID NO: 8366 - DNA, 84 bp, synthetic construct
  source 1..84: mol_type = other DNA
tttttttaagcagtggtatcaacgcagagtacnntgaaggcanncgtagcaanntttttttttttttttttttttttttttttt

SEQ ID NO: 8367 - DNA, 84 bp, synthetic construct
  source 1..84: mol_type = other DNA
tttttttaagcagtggtatcaacgcagagtacnntgaaggcanntggcagtanntttttttttttttttttttttttttttttt

SEQ ID NO: 8368 - DNA, 84 bp, synthetic construct
  source 1..84: mol_type = other DNA
tttttttaagcagtggtatcaacgcagagtacnntgaaggcanncggtagttnntttttttttttttttttttttttttttttt

SEQ ID NO: 8369 - DNA, 84 bp, synthetic construct
  source 1..84: mol_type = other DNA
tttttttaagcagtggtatcaacgcagagtacnntgaaggcanntgacttcgnntttttttttttttttttttttttttttttt

SEQ ID NO: 8370 - DNA, 84 bp, synthetic construct
  source 1..84: mol_type = other DNA
tttttttaagcagtggtatcaacgcagagtacnntgaaggcanngagtgcaanntttttttttttttttttttttttttttttt

SEQ ID NO: 8371 - DNA, 84 bp, synthetic construct
  source 1..84: mol_type = other DNA
tttttttaagcagtggtatcaacgcagagtacnntgaaggcannacggtaacnntttttttttttttttttttttttttttttt

SEQ ID NO: 8372 - DNA, 84 bp, synthetic construct
  source 1..84: mol_type = other DNA
tttttttaagcagtggtatcaacgcagagtacnntgaaggcannaagtggtgnntttttttttttttttttttttttttttttt

SEQ ID NO: 8373 - DNA, 84 bp, synthetic construct
  source 1..84: mol_type = other DNA
tttttttaagcagtggtatcaacgcagagtacnntgaaggcannggagacaanntttttttttttttttttttttttttttttt

SEQ ID NO: 8374 - DNA, 84 bp, synthetic construct
  source 1..84: mol_type = other DNA
tttttttaagcagtggtatcaacgcagagtacnntgaaggcanntcaaggacnntttttttttttttttttttttttttttttt

SEQ ID NO: 8375 - DNA, 84 bp, synthetic construct
  source 1..84: mol_type = other DNA
tttttttaagcagtggtatcaacgcagagtacnntgaaggcannaagagagcnntttttttttttttttttttttttttttttt

SEQ ID NO: 8376 - DNA, 84 bp, synthetic construct
  source 1..84: mol_type = other DNA
tttttttaagcagtggtatcaacgcagagtacnntgaaggcanncgagagatnntttttttttttttttttttttttttttttt

SEQ ID NO: 8377 - DNA, 84 bp, synthetic construct
  source 1..84: mol_type = other DNA
tttttttaagcagtggtatcaacgcagagtacnntgaaggcannacagatggnntttttttttttttttttttttttttttttt

SEQ ID NO: 8378 - DNA, 84 bp, synthetic construct
  source 1..84: mol_type = other DNA
tttttttaagcagtggtatcaacgcagagtacnntgaaggcannaggagtcanntttttttttttttttttttttttttttttt

SEQ ID NO: 8379 - DNA, 84 bp, synthetic construct
  source 1..84: mol_type = other DNA
tttttttaagcagtggtatcaacgcagagtacnntgaaggcanncgtgttacnntttttttttttttttttttttttttttttt

SEQ ID NO: 8380 - DNA, 84 bp, synthetic construct
  source 1..84: mol_type = other DNA
tttttttaagcagtggtatcaacgcagagtacnntgaaggcanntagtgtgcnntttttttttttttttttttttttttttttt

SEQ ID NO: 8381 - DNA, 84 bp, synthetic construct
  source 1..84: mol_type = other DNA
tttttttaagcagtggtatcaacgcagagtacnntgaaggcannctcatgacnntttttttttttttttttttttttttttttt

SEQ ID NO: 8382 - DNA, 84 bp, synthetic construct
  source 1..84: mol_type = other DNA
tttttttaagcagtggtatcaacgcagagtacnntgaaggcanngtatccagnntttttttttttttttttttttttttttttt

SEQ ID NO: 8383 - DNA, 84 bp, synthetic construct
  source 1..84: mol_type = other DNA
tttttttaagcagtggtatcaacgcagagtacnntgaaggcannacgcctatnntttttttttttttttttttttttttttttt

SEQ ID NO: 8384 - DNA, 84 bp, synthetic construct
  source 1..84: mol_type = other DNA
tttttttaagcagtggtatcaacgcagagtacnntgaaggcannaacgacctnntttttttttttttttttttttttttttttt

SEQ ID NO: 8385 - DNA, 84 bp, synthetic construct
  source 1..84: mol_type = other DNA
tttttttaagcagtggtatcaacgcagagtacnntgaaggcannatcaggctnntttttttttttttttttttttttttttttt

SEQ ID NO: 8386 - DNA, 84 bp, synthetic construct
  source 1..84: mol_type = other DNA
tttttttaagcagtggtatcaacgcagagtacnntgaaggcanncaagttcgnntttttttttttttttttttttttttttttt

SEQ ID NO: 8387 - DNA, 84 bp, synthetic construct
  source 1..84: mol_type = other DNA
tttttttaagcagtggtatcaacgcagagtacnntgaaggcanntagccaganntttttttttttttttttttttttttttttt

SEQ ID NO: 8388 - DNA, 84 bp, synthetic construct
  source 1..84: mol_type = other DNA
tttttttaagcagtggtatcaacgcagagtacnntgaaggcanncaatcacgnntttttttttttttttttttttttttttttt

SEQ ID NO: 8389 - DNA, 84 bp, synthetic construct
  source 1..84: mol_type = other DNA
tttttttaagcagtggtatcaacgcagagtacnntgaaggcanngcaacaagnntttttttttttttttttttttttttttttt

SEQ ID NO: 8390 - DNA, 84 bp, synthetic construct
  source 1..84: mol_type = other DNA
tttttttaagcagtggtatcaacgcagagtacnntgaaggcanncacgacaanntttttttttttttttttttttttttttttt

SEQ ID NO: 8391 - DNA, 84 bp, synthetic construct
  source 1..84: mol_type = other DNA
tttttttaagcagtggtatcaacgcagagtacnntgaaggcanntacggaganntttttttttttttttttttttttttttttt

SEQ ID NO: 8392 - DNA, 84 bp, synthetic construct
  source 1..84: mol_type = other DNA
tttttttaagcagtggtatcaacgcagagtacnntgaaggcanncgacaaganntttttttttttttttttttttttttttttt

SEQ ID NO: 8393 - DNA, 84 bp, synthetic construct
  source 1..84: mol_type = other DNA
tttttttaagcagtggtatcaacgcagagtacnntgaaggcanncgaagtganntttttttttttttttttttttttttttttt

SEQ ID NO: 8394 - DNA, 84 bp, synthetic construct
  source 1..84: mol_type = other DNA
tttttttaagcagtggtatcaacgcagagtacnntgaaggcannagctggtanntttttttttttttttttttttttttttttt

SEQ ID NO: 8395 - DNA, 84 bp, synthetic construct
  source 1..84: mol_type = other DNA
tttttttaagcagtggtatcaacgcagagtacnntgaaggcannaactaggcnntttttttttttttttttttttttttttttt

SEQ ID NO: 8396 - DNA, 84 bp, synthetic construct
  source 1..84: mol_type = other DNA
tttttttaagcagtggtatcaacgcagagtacnntgaaggcanncagcaagtnntttttttttttttttttttttttttttttt

SEQ ID NO: 8397 - DNA, 84 bp, synthetic construct
  source 1..84: mol_type = other DNA
tttttttaagcagtggtatcaacgcagagtacnntgaaggcannacgaggtanntttttttttttttttttttttttttttttt

SEQ ID NO: 8398 - DNA, 84 bp, synthetic construct
  source 1..84: mol_type = other DNA
tttttttaagcagtggtatcaacgcagagtacnntgaaggcanncatcttccnntttttttttttttttttttttttttttttt

SEQ ID NO: 8399 - DNA, 84 bp, synthetic construct
  source 1..84: mol_type = other DNA
tttttttaagcagtggtatcaacgcagagtacnntgaaggcanncctgaatcnntttttttttttttttttttttttttttttt

SEQ ID NO: 8400 - DNA, 84 bp, synthetic construct
  source 1..84: mol_type = other DNA
tttttttaagcagtggtatcaacgcagagtacnntgaaggcanntgcagactnntttttttttttttttttttttttttttttt

SEQ ID NO: 8401 - DNA, 84 bp, synthetic construct
  source 1..84: mol_type = other DNA
tttttttaagcagtggtatcaacgcagagtacnntgaaggcannagatgtggnntttttttttttttttttttttttttttttt

SEQ ID NO: 8402 - DNA, 84 bp, synthetic construct
  source 1..84: mol_type = other DNA
tttttttaagcagtggtatcaacgcagagtacnntgaaggcannagttcgacnntttttttttttttttttttttttttttttt

SEQ ID NO: 8403 - DNA, 84 bp, synthetic construct
  source 1..84: mol_type = other DNA
tttttttaagcagtggtatcaacgcagagtacnntgaaggcannacaacctcnntttttttttttttttttttttttttttttt

SEQ ID NO: 8404 - DNA, 84 bp, synthetic construct
  source 1..84: mol_type = other DNA
tttttttaagcagtggtatcaacgcagagtacnntgaaggcanncatggtagnntttttttttttttttttttttttttttttt

SEQ ID NO: 8405 - DNA, 84 bp, synthetic construct
  source 1..84: mol_type = other DNA
tttttttaagcagtggtatcaacgcagagtacnntgaaggcanncgtatctcnntttttttttttttttttttttttttttttt

SEQ ID NO: 8406 - DNA, 84 bp, synthetic construct
  source 1..84: mol_type = other DNA
tttttttaagcagtggtatcaacgcagagtacnntgaaggcanncctagttcnntttttttttttttttttttttttttttttt

SEQ ID NO: 8407 - DNA, 84 bp, synthetic construct
  source 1..84: mol_type = other DNA
tttttttaagcagtggtatcaacgcagagtacnntgaaggcanncaagagtcnntttttttttttttttttttttttttttttt

SEQ ID NO: 8408 - DNA, 84 bp, synthetic construct
  source 1..84: mol_type = other DNA
tttttttaagcagtggtatcaacgcagagtacnntccgatgannaatcggcanntttttttttttttttttttttttttttttt

SEQ ID NO: 8409 - DNA, 84 bp, synthetic construct
  source 1..84: mol_type = other DNA
tttttttaagcagtggtatcaacgcagagtacnntccgatganntacggcatnntttttttttttttttttttttttttttttt

SEQ ID NO: 8410 - DNA, 84 bp, synthetic construct
  source 1..84: mol_type = other DNA
tttttttaagcagtggtatcaacgcagagtacnntccgatgannttggatcgnntttttttttttttttttttttttttttttt

SEQ ID NO: 8411 - DNA, 84 bp, synthetic construct
  source 1..84: mol_type = other DNA
tttttttaagcagtggtatcaacgcagagtacnntccgatganntggaacganntttttttttttttttttttttttttttttt

SEQ ID NO: 8412 - DNA, 84 bp, synthetic construct
  source 1..84: mol_type = other DNA
tttttttaagcagtggtatcaacgcagagtacnntccgatgannggcaatcanntttttttttttttttttttttttttttttt

SEQ ID NO: 8413 - DNA, 84 bp, synthetic construct
  source 1..84: mol_type = other DNA
tttttttaagcagtggtatcaacgcagagtacnntccgatganngaatccganntttttttttttttttttttttttttttttt

SEQ ID NO: 8414 - DNA, 84 bp, synthetic construct
  source 1..84: mol_type = other DNA
tttttttaagcagtggtatcaacgcagagtacnntccgatgannttacggtgnntttttttttttttttttttttttttttttt

SEQ ID NO: 8415 - DNA, 84 bp, synthetic construct
  source 1..84: mol_type = other DNA
tttttttaagcagtggtatcaacgcagagtacnntccgatganncatatcggnntttttttttttttttttttttttttttttt

SEQ ID NO: 8416 - DNA, 84 bp, synthetic construct
  source 1..84: mol_type = other DNA
tttttttaagcagtggtatcaacgcagagtacnntccgatganncttcggtanntttttttttttttttttttttttttttttt

SEQ ID NO: 8417 - DNA, 84 bp, synthetic construct
  source 1..84: mol_type = other DNA
tttttttaagcagtggtatcaacgcagagtacnntccgatganntcctaacgnntttttttttttttttttttttttttttttt

SEQ ID NO: 8418 - DNA, 84 bp, synthetic construct
  source 1..84: mol_type = other DNA
tttttttaagcagtggtatcaacgcagagtacnntccgatganngtaagccanntttttttttttttttttttttttttttttt

SEQ ID NO: 8419 - DNA, 84 bp, synthetic construct
  source 1..84: mol_type = other DNA
tttttttaagcagtggtatcaacgcagagtacnntccgatganntaaggtggnntttttttttttttttttttttttttttttt

SEQ ID NO: 8420 - DNA, 84 bp, synthetic construct
  source 1..84: mol_type = other DNA
tttttttaagcagtggtatcaacgcagagtacnntccgatgannggtaagctnntttttttttttttttttttttttttttttt

SEQ ID NO: 8421 - DNA, 84 bp, synthetic construct
  source 1..84: mol_type = other DNA
tttttttaagcagtggtatcaacgcagagtacnntccgatganntgtgtcganntttttttttttttttttttttttttttttt

SEQ ID NO: 8422 - DNA, 84 bp, synthetic construct
  source 1..84: mol_type = other DNA
tttttttaagcagtggtatcaacgcagagtacnntccgatganngagcatganntttttttttttttttttttttttttttttt

SEQ ID NO: 8423 - DNA, 84 bp, synthetic construct
  source 1..84: mol_type = other DNA
tttttttaagcagtggtatcaacgcagagtacnntccgatganntcgaagtcnntttttttttttttttttttttttttttttt

SEQ ID NO: 8424 - DNA, 84 bp, synthetic construct
  source 1..84: mol_type = other DNA
tttttttaagcagtggtatcaacgcagagtacnntccgatgannggtgaacanntttttttttttttttttttttttttttttt

SEQ ID NO: 8425 - DNA, 84 bp, synthetic construct
  source 1..84: mol_type = other DNA
tttttttaagcagtggtatcaacgcagagtacnntccgatgannacatgcacnntttttttttttttttttttttttttttttt

SEQ ID NO: 8426 - DNA, 84 bp, synthetic construct
  source 1..84: mol_type = other DNA
tttttttaagcagtggtatcaacgcagagtacnntccgatgannccaacagtnntttttttttttttttttttttttttttttt

SEQ ID NO: 8427 - DNA, 84 bp, synthetic construct
  source 1..84: mol_type = other DNA
tttttttaagcagtggtatcaacgcagagtacnntccgatgannagaacagcnntttttttttttttttttttttttttttttt

SEQ ID NO: 8428 - DNA, 84 bp, synthetic construct
  source 1..84: mol_type = other DNA
tttttttaagcagtggtatcaacgcagagtacnntccgatganngaacacgtnntttttttttttttttttttttttttttttt

SEQ ID NO: 8429 - DNA, 84 bp, synthetic construct
  source 1..84: mol_type = other DNA
tttttttaagcagtggtatcaacgcagagtacnntccgatgannggtcttcanntttttttttttttttttttttttttttttt

SEQ ID NO: 8430 - DNA, 84 bp, synthetic construct
  source 1..84: mol_type = other DNA
tttttttaagcagtggtatcaacgcagagtacnntccgatgannaggttcagnntttttttttttttttttttttttttttttt

SEQ ID NO: 8431 - DNA, 84 bp, synthetic construct
  source 1..84: mol_type = other DNA
tttttttaagcagtggtatcaacgcagagtacnntccgatgannctagagcanntttttttttttttttttttttttttttttt

SEQ ID NO: 8432 - DNA, 84 bp, synthetic construct
  source 1..84: mol_type = other DNA
tttttttaagcagtggtatcaacgcagagtacnntccgatganncttctagcnntttttttttttttttttttttttttttttt

SEQ ID NO: 8433 - DNA, 84 bp, synthetic construct
  source 1..84: mol_type = other DNA
tttttttaagcagtggtatcaacgcagagtacnntccgatganngagtaacgnntttttttttttttttttttttttttttttt

SEQ ID NO: 8434 - DNA, 84 bp, synthetic construct
  source 1..84: mol_type = other DNA
tttttttaagcagtggtatcaacgcagagtacnntccgatgannctaagaggnntttttttttttttttttttttttttttttt

SEQ ID NO: 8435 - DNA, 84 bp, synthetic construct
  source 1..84: mol_type = other DNA
tttttttaagcagtggtatcaacgcagagtacnntccgatgannacgtgtagnntttttttttttttttttttttttttttttt

SEQ ID NO: 8436 - DNA, 84 bp, synthetic construct
  source 1..84: mol_type = other DNA
tttttttaagcagtggtatcaacgcagagtacnntccgatgannactacaggnntttttttttttttttttttttttttttttt

SEQ ID NO: 8437 - DNA, 84 bp, synthetic construct
  source 1..84: mol_type = other DNA
tttttttaagcagtggtatcaacgcagagtacnntccgatganntacaggtcnntttttttttttttttttttttttttttttt

SEQ ID NO: 8438 - DNA, 84 bp, synthetic construct
  source 1..84: mol_type = other DNA
tttttttaagcagtggtatcaacgcagagtacnntccgatgannctcacatgnntttttttttttttttttttttttttttttt

SEQ ID NO: 8439 - DNA, 84 bp, synthetic construct
  source 1..84: mol_type = other DNA
tttttttaagcagtggtatcaacgcagagtacnntccgatgannactaggagnntttttttttttttttttttttttttttttt

SEQ ID NO: 8440 - DNA, 84 bp, synthetic construct
  source 1..84: mol_type = other DNA
tttttttaagcagtggtatcaacgcagagtacnntccgatgannccatagganntttttttttttttttttttttttttttttt

SEQ ID NO: 8441 - DNA, 84 bp, synthetic construct
  source 1..84: mol_type = other DNA
tttttttaagcagtggtatcaacgcagagtacnntccgatgannggagaatcnntttttttttttttttttttttttttttttt

SEQ ID NO: 8442 - DNA, 84 bp, synthetic construct
  source 1..84: mol_type = other DNA
tttttttaagcagtggtatcaacgcagagtacnntccgatganngccaagaanntttttttttttttttttttttttttttttt

SEQ ID NO: 8443 - DNA, 84 bp, synthetic construct
  source 1..84: mol_type = other DNA
tttttttaagcagtggtatcaacgcagagtacnntccgatgannaaggcaagnntttttttttttttttttttttttttttttt

SEQ ID NO: 8444 - DNA, 84 bp, synthetic construct
  source 1..84: mol_type = other DNA
tttttttaagcagtggtatcaacgcagagtacnntccgatgannaatgtcgcnntttttttttttttttttttttttttttttt

SEQ ID NO: 8445 - DNA, 84 bp, synthetic construct
  source 1..84: mol_type = other DNA
tttttttaagcagtggtatcaacgcagagtacnntccgatgannatggaaccnntttttttttttttttttttttttttttttt

SEQ ID NO: 8446 - DNA, 84 bp, synthetic construct
  source 1..84: mol_type = other DNA
tttttttaagcagtggtatcaacgcagagtacnntccgatgannagaggcatnntttttttttttttttttttttttttttttt

SEQ ID NO: 8447 - DNA, 84 bp, synthetic construct
  source 1..84: mol_type = other DNA
tttttttaagcagtggtatcaacgcagagtacnntccgatganntgcatagcnntttttttttttttttttttttttttttttt

SEQ ID NO: 8448 - DNA, 84 bp, synthetic construct
  source 1..84: mol_type = other DNA
tttttttaagcagtggtatcaacgcagagtacnntccgatgannctaacgganntttttttttttttttttttttttttttttt

SEQ ID NO: 8449 - DNA, 84 bp, synthetic construct
  source 1..84: mol_type = other DNA
tttttttaagcagtggtatcaacgcagagtacnntccgatganntatcgaggnntttttttttttttttttttttttttttttt

SEQ ID NO: 8450 - DNA, 84 bp, synthetic construct
  source 1..84: mol_type = other DNA
tttttttaagcagtggtatcaacgcagagtacnntccgatganncatagcctnntttttttttttttttttttttttttttttt

SEQ ID NO: 8451 - DNA, 84 bp, synthetic construct
  source 1..84: mol_type = other DNA
tttttttaagcagtggtatcaacgcagagtacnntccgatgannatcgagacnntttttttttttttttttttttttttttttt

SEQ ID NO: 8452 - DNA, 84 bp, synthetic construct
  source 1..84: mol_type = other DNA
tttttttaagcagtggtatcaacgcagagtacnntccgatgannggaagagtnntttttttttttttttttttttttttttttt

SEQ ID NO: 8453 - DNA, 84 bp, synthetic construct
  source 1..84: mol_type = other DNA
tttttttaagcagtggtatcaacgcagagtacnntccgatgannccaagtagnntttttttttttttttttttttttttttttt

SEQ ID NO: 8454 - DNA, 84 bp, synthetic construct
  source 1..84: mol_type = other DNA
tttttttaagcagtggtatcaacgcagagtacnntccgatgannctgaacagnntttttttttttttttttttttttttttttt

SEQ ID NO: 8455 - DNA, 84 bp, synthetic construct
  source 1..84: mol_type = other DNA
tttttttaagcagtggtatcaacgcagagtacnntccgatganngtaggttcnntttttttttttttttttttttttttttttt

SEQ ID NO: 8456 - DNA, 84 bp, synthetic construct
  source 1..84: mol_type = other DNA
tttttttaagcagtggtatcaacgcagagtacnntccgatganngtatggacnntttttttttttttttttttttttttttttt

SEQ ID NO: 8457 - DNA, 84 bp, synthetic construct
  source 1..84: mol_type = other DNA
tttttttaagcagtggtatcaacgcagagtacnntccgatganntcgcaacanntttttttttttttttttttttttttttttt

SEQ ID NO: 8458 - DNA, 84 bp, synthetic construct
  source 1..84: mol_type = other DNA
tttttttaagcagtggtatcaacgcagagtacnntccgatgannccgctaatnntttttttttttttttttttttttttttttt

SEQ ID NO: 8459 - DNA, 84 bp, synthetic construct
  source 1..84: mol_type = other DNA
tttttttaagcagtggtatcaacgcagagtacnntccgatganngattcgcanntttttttttttttttttttttttttttttt

SEQ ID NO: 8460 - DNA, 84 bp, synthetic construct
  source 1..84: mol_type = other DNA
tttttttaagcagtggtatcaacgcagagtacnntccgatganncgatggaanntttttttttttttttttttttttttttttt

SEQ ID NO: 8461 - DNA, 84 bp, synthetic construct
  source 1..84: mol_type = other DNA
tttttttaagcagtggtatcaacgcagagtacnntccgatgannagcaagganntttttttttttttttttttttttttttttt

SEQ ID NO: 8462 - DNA, 84 bp, synthetic construct
  source 1..84: mol_type = other DNA
tttttttaagcagtggtatcaacgcagagtacnntccgatganncgtagcaanntttttttttttttttttttttttttttttt

SEQ ID NO: 8463 - DNA, 84 bp, synthetic construct
  source 1..84: mol_type = other DNA
tttttttaagcagtggtatcaacgcagagtacnntccgatganntggcagtanntttttttttttttttttttttttttttttt

SEQ ID NO: 8464 - DNA, 84 bp, synthetic construct
  source 1..84: mol_type = other DNA
tttttttaagcagtggtatcaacgcagagtacnntccgatganncggtagttnntttttttttttttttttttttttttttttt

SEQ ID NO: 8465 - DNA, 84 bp, synthetic construct
  source 1..84: mol_type = other DNA
tttttttaagcagtggtatcaacgcagagtacnntccgatganntgacttcgnntttttttttttttttttttttttttttttt

SEQ ID NO: 8466 - DNA, 84 bp, synthetic construct
  source 1..84: mol_type = other DNA
tttttttaagcagtggtatcaacgcagagtacnntccgatganngagtgcaanntttttttttttttttttttttttttttttt

SEQ ID NO: 8467 - DNA, 84 bp, synthetic construct
  source 1..84: mol_type = other DNA
tttttttaagcagtggtatcaacgcagagtacnntccgatgannacggtaacnntttttttttttttttttttttttttttttt

SEQ ID NO: 8468 - DNA, 84 bp, synthetic construct
  source 1..84: mol_type = other DNA
tttttttaagcagtggtatcaacgcagagtacnntccgatgannaagtggtgnntttttttttttttttttttttttttttttt

SEQ ID NO: 8469 - DNA, 84 bp, synthetic construct
  source 1..84: mol_type = other DNA
tttttttaagcagtggtatcaacgcagagtacnntccgatgannggagacaanntttttttttttttttttttttttttttttt

SEQ ID NO: 8470 - DNA, 84 bp, synthetic construct
  source 1..84: mol_type = other DNA
tttttttaagcagtggtatcaacgcagagtacnntccgatganntcaaggacnntttttttttttttttttttttttttttttt

SEQ ID NO: 8471 - DNA, 84 bp, synthetic construct
  source 1..84: mol_type = other DNA
tttttttaagcagtggtatcaacgcagagtacnntccgatgannaagagagcnntttttttttttttttttttttttttttttt

SEQ ID NO: 8472 - DNA, 84 bp, synthetic construct
  source 1..84: mol_type = other DNA
tttttttaagcagtggtatcaacgcagagtacnntccgatganncgagagatnntttttttttttttttttttttttttttttt

SEQ ID NO: 8473 - DNA, 84 bp, synthetic construct
  source 1..84: mol_type = other DNA
tttttttaagcagtggtatcaacgcagagtacnntccgatgannacagatggnntttttttttttttttttttttttttttttt

SEQ ID NO: 8474 - DNA, 84 bp, synthetic construct
  source 1..84: mol_type = other DNA
tttttttaagcagtggtatcaacgcagagtacnntccgatgannaggagtcanntttttttttttttttttttttttttttttt

SEQ ID NO: 8475 - DNA, 84 bp, synthetic construct
  source 1..84: mol_type = other DNA
tttttttaagcagtggtatcaacgcagagtacnntccgatganncgtgttacnntttttttttttttttttttttttttttttt

SEQ ID NO: 8476 - DNA, 84 bp, synthetic construct
  source 1..84: mol_type = other DNA
tttttttaagcagtggtatcaacgcagagtacnntccgatganntagtgtgcnntttttttttttttttttttttttttttttt

SEQ ID NO: 8477 - DNA, 84 bp, synthetic construct
  source 1..84: mol_type = other DNA
tttttttaagcagtggtatcaacgcagagtacnntccgatgannctcatgacnntttttttttttttttttttttttttttttt

SEQ ID NO: 8478 - DNA, 84 bp, synthetic construct
  source 1..84: mol_type = other DNA
tttttttaagcagtggtatcaacgcagagtacnntccgatganngtatccagnntttttttttttttttttttttttttttttt

SEQ ID NO: 8479 - DNA, 84 bp, synthetic construct
  source 1..84: mol_type = other DNA
tttttttaagcagtggtatcaacgcagagtacnntccgatgannacgcctatnntttttttttttttttttttttttttttttt

SEQ ID NO: 8480 - DNA, 84 bp, synthetic construct
  source 1..84: mol_type = other DNA
tttttttaagcagtggtatcaacgcagagtacnntccgatgannaacgacctnntttttttttttttttttttttttttttttt

SEQ ID NO: 8481 - DNA, 84 bp, synthetic construct
  source 1..84: mol_type = other DNA
tttttttaagcagtggtatcaacgcagagtacnntccgatgannatcaggctnntttttttttttttttttttttttttttttt

SEQ ID NO: 8482 - DNA, 84 bp, synthetic construct
  source 1..84: mol_type = other DNA
tttttttaagcagtggtatcaacgcagagtacnntccgatganncaagttcgnntttttttttttttttttttttttttttttt

SEQ ID NO: 8483 - DNA, 84 bp, synthetic construct
  source 1..84: mol_type = other DNA
tttttttaagcagtggtatcaacgcagagtacnntccgatganntagccaganntttttttttttttttttttttttttttttt

SEQ ID NO: 8484 - DNA, 84 bp, synthetic construct
  source 1..84: mol_type = other DNA
tttttttaagcagtggtatcaacgcagagtacnntccgatganncaatcacgnntttttttttttttttttttttttttttttt

SEQ ID NO: 8485 - DNA, 84 bp, synthetic construct
  source 1..84: mol_type = other DNA
tttttttaagcagtggtatcaacgcagagtacnntccgatganngcaacaagnntttttttttttttttttttttttttttttt

SEQ ID NO: 8486 - DNA, 84 bp, synthetic construct
  source 1..84: mol_type = other DNA
tttttttaagcagtggtatcaacgcagagtacnntccgatganncacgacaanntttttttttttttttttttttttttttttt

SEQ ID NO: 8487 - DNA, 84 bp, synthetic construct
  source 1..84: mol_type = other DNA
tttttttaagcagtggtatcaacgcagagtacnntccgatganntacggaganntttttttttttttttttttttttttttttt

SEQ ID NO: 8488 - DNA, 84 bp, synthetic construct
  source 1..84: mol_type = other DNA
tttttttaagcagtggtatcaacgcagagtacnntccgatganncgacaaganntttttttttttttttttttttttttttttt

SEQ ID NO: 8489 - DNA, 84 bp, synthetic construct
  source 1..84: mol_type = other DNA
tttttttaagcagtggtatcaacgcagagtacnntccgatganncgaagtganntttttttttttttttttttttttttttttt

SEQ ID NO: 8490 - DNA, 84 bp, synthetic construct
  source 1..84: mol_type = other DNA
tttttttaagcagtggtatcaacgcagagtacnntccgatgannagctggtanntttttttttttttttttttttttttttttt

SEQ ID NO: 8491 - DNA, 84 bp, synthetic construct
  source 1..84: mol_type = other DNA
tttttttaagcagtggtatcaacgcagagtacnntccgatgannaactaggcnntttttttttttttttttttttttttttttt

SEQ ID NO: 8492 - DNA, 84 bp, synthetic construct
  source 1..84: mol_type = other DNA
tttttttaagcagtggtatcaacgcagagtacnntccgatganncagcaagtnntttttttttttttttttttttttttttttt

SEQ ID NO: 8493 - DNA, 84 bp, synthetic construct
  source 1..84: mol_type = other DNA
tttttttaagcagtggtatcaacgcagagtacnntccgatgannacgaggtanntttttttttttttttttttttttttttttt

SEQ ID NO: 8494 - DNA, 84 bp, synthetic construct
  source 1..84: mol_type = other DNA
tttttttaagcagtggtatcaacgcagagtacnntccgatganncatcttccnntttttttttttttttttttttttttttttt

SEQ ID NO: 8495 - DNA, 84 bp, synthetic construct
  source 1..84: mol_type = other DNA
tttttttaagcagtggtatcaacgcagagtacnntccgatganncctgaatcnntttttttttttttttttttttttttttttt

SEQ ID NO: 8496 - DNA, 84 bp, synthetic construct
  source 1..84: mol_type = other DNA
tttttttaagcagtggtatcaacgcagagtacnntccgatganntgcagactnntttttttttttttttttttttttttttttt

SEQ ID NO: 8497 - DNA, 84 bp, synthetic construct
  source 1..84: mol_type = other DNA
tttttttaagcagtggtatcaacgcagagtacnntccgatgannagatgtggnntttttttttttttttttttttttttttttt

SEQ ID NO: 8498 - DNA, 84 bp, synthetic construct
  source 1..84: mol_type = other DNA
tttttttaagcagtggtatcaacgcagagtacnntccgatgannagttcgacnntttttttttttttttttttttttttttttt

SEQ ID NO: 8499 - DNA, 84 bp, synthetic construct
  source 1..84: mol_type = other DNA
tttttttaagcagtggtatcaacgcagagtacnntccgatgannacaacctcnntttttttttttttttttttttttttttttt

SEQ ID NO: 8500 - DNA, 84 bp, synthetic construct
  source 1..84: mol_type = other DNA
tttttttaagcagtggtatcaacgcagagtacnntccgatganncatggtagnntttttttttttttttttttttttttttttt

SEQ ID NO: 8501 - DNA, 84 bp, synthetic construct
  source 1..84: mol_type = other DNA
tttttttaagcagtggtatcaacgcagagtacnntccgatganncgtatctcnntttttttttttttttttttttttttttttt

SEQ ID NO: 8502 - DNA, 84 bp, synthetic construct
  source 1..84: mol_type = other DNA
tttttttaagcagtggtatcaacgcagagtacnntccgatganncctagttcnntttttttttttttttttttttttttttttt

SEQ ID NO: 8503 - DNA, 84 bp, synthetic construct
  source 1..84: mol_type = other DNA
tttttttaagcagtggtatcaacgcagagtacnntccgatganncaagagtcnntttttttttttttttttttttttttttttt

SEQ ID NO: 8504 - DNA, 84 bp, synthetic construct
  source 1..84: mol_type = other DNA
tttttttaagcagtggtatcaacgcagagtacnnacgaatccnnaatcggcanntttttttttttttttttttttttttttttt

SEQ ID NO: 8505 - DNA, 84 bp, synthetic construct
  source 1..84: mol_type = other DNA
tttttttaagcagtggtatcaacgcagagtacnnacgaatccnntacggcatnntttttttttttttttttttttttttttttt

SEQ ID NO: 8506 - DNA, 84 bp, synthetic construct
  source 1..84: mol_type = other DNA
tttttttaagcagtggtatcaacgcagagtacnnacgaatccnnttggatcgnntttttttttttttttttttttttttttttt

SEQ ID NO: 8507 - DNA, 84 bp, synthetic construct
  source 1..84: mol_type = other DNA
tttttttaagcagtggtatcaacgcagagtacnnacgaatccnntggaacganntttttttttttttttttttttttttttttt

SEQ ID NO: 8508 - DNA, 84 bp, synthetic construct
  source 1..84: mol_type = other DNA
tttttttaagcagtggtatcaacgcagagtacnnacgaatccnnggcaatcanntttttttttttttttttttttttttttttt

SEQ ID NO: 8509 - DNA, 84 bp, synthetic construct
  source 1..84: mol_type = other DNA
tttttttaagcagtggtatcaacgcagagtacnnacgaatccnngaatccganntttttttttttttttttttttttttttttt

SEQ ID NO: 8510 - DNA, 84 bp, synthetic construct
  source 1..84: mol_type = other DNA
tttttttaagcagtggtatcaacgcagagtacnnacgaatccnnttacggtgnntttttttttttttttttttttttttttttt

SEQ ID NO: 8511 - DNA, 84 bp, synthetic construct
  source 1..84: mol_type = other DNA
tttttttaagcagtggtatcaacgcagagtacnnacgaatccnncatatcggnntttttttttttttttttttttttttttttt

SEQ ID NO: 8512 - DNA, 84 bp, synthetic construct
  source 1..84: mol_type = other DNA
tttttttaagcagtggtatcaacgcagagtacnnacgaatccnncttcggtanntttttttttttttttttttttttttttttt

SEQ ID NO: 8513 - DNA, 84 bp, synthetic construct
  source 1..84: mol_type = other DNA
tttttttaagcagtggtatcaacgcagagtacnnacgaatccnntcctaacgnntttttttttttttttttttttttttttttt

SEQ ID NO: 8514 - DNA, 84 bp, synthetic construct
  source 1..84: mol_type = other DNA
tttttttaagcagtggtatcaacgcagagtacnnacgaatccnngtaagccanntttttttttttttttttttttttttttttt

SEQ ID NO: 8515 - DNA, 84 bp, synthetic construct
  source 1..84: mol_type = other DNA
tttttttaagcagtggtatcaacgcagagtacnnacgaatccnntaaggtggnntttttttttttttttttttttttttttttt

SEQ ID NO: 8516 - DNA, 84 bp, synthetic construct
  source 1..84: mol_type = other DNA
tttttttaagcagtggtatcaacgcagagtacnnacgaatccnnggtaagctnntttttttttttttttttttttttttttttt

SEQ ID NO: 8517 - DNA, 84 bp, synthetic construct
  source 1..84: mol_type = other DNA
tttttttaagcagtggtatcaacgcagagtacnnacgaatccnntgtgtcganntttttttttttttttttttttttttttttt

SEQ ID NO: 8518 - DNA, 84 bp, synthetic construct
  source 1..84: mol_type = other DNA
tttttttaagcagtggtatcaacgcagagtacnnacgaatccnngagcatganntttttttttttttttttttttttttttttt

SEQ ID NO: 8519 - DNA, 84 bp, synthetic construct
  source 1..84: mol_type = other DNA
tttttttaagcagtggtatcaacgcagagtacnnacgaatccnntcgaagtcnntttttttttttttttttttttttttttttt

SEQ ID NO: 8520 - DNA, 84 bp, synthetic construct
  source 1..84: mol_type = other DNA
tttttttaagcagtggtatcaacgcagagtacnnacgaatccnnggtgaacanntttttttttttttttttttttttttttttt

SEQ ID NO: 8521 - DNA, 84 bp, synthetic construct
  source 1..84: mol_type = other DNA
tttttttaagcagtggtatcaacgcagagtacnnacgaatccnnacatgcacnntttttttttttttttttttttttttttttt

SEQ ID NO: 8522 - DNA, 84 bp, synthetic construct
  source 1..84: mol_type = other DNA
tttttttaagcagtggtatcaacgcagagtacnnacgaatccnnccaacagtnntttttttttttttttttttttttttttttt

SEQ ID NO: 8523 - DNA, 84 bp, synthetic construct
  source 1..84: mol_type = other DNA
tttttttaagcagtggtatcaacgcagagtacnnacgaatccnnagaacagcnntttttttttttttttttttttttttttttt

SEQ ID NO: 8524 - DNA, 84 bp, synthetic construct
  source 1..84: mol_type = other DNA
tttttttaagcagtggtatcaacgcagagtacnnacgaatccnngaacacgtnntttttttttttttttttttttttttttttt

SEQ ID NO: 8525 - DNA, 84 bp, synthetic construct
  source 1..84: mol_type = other DNA
tttttttaagcagtggtatcaacgcagagtacnnacgaatccnnggtcttcanntttttttttttttttttttttttttttttt

SEQ ID NO: 8526 - DNA, 84 bp, synthetic construct
  source 1..84: mol_type = other DNA
tttttttaagcagtggtatcaacgcagagtacnnacgaatccnnaggttcagnntttttttttttttttttttttttttttttt

SEQ ID NO: 8527 - DNA, 84 bp, synthetic construct
  source 1..84: mol_type = other DNA
tttttttaagcagtggtatcaacgcagagtacnnacgaatccnnctagagcanntttttttttttttttttttttttttttttt

SEQ ID NO: 8528 - DNA, 84 bp, synthetic construct
  source 1..84: mol_type = other DNA
tttttttaagcagtggtatcaacgcagagtacnnacgaatccnncttctagcnntttttttttttttttttttttttttttttt

SEQ ID NO: 8529 - DNA, 84 bp, synthetic construct
  source 1..84: mol_type = other DNA
tttttttaagcagtggtatcaacgcagagtacnnacgaatccnngagtaacgnntttttttttttttttttttttttttttttt

SEQ ID NO: 8530 - DNA, 84 bp, synthetic construct
  source 1..84: mol_type = other DNA
tttttttaagcagtggtatcaacgcagagtacnnacgaatccnnctaagaggnntttttttttttttttttttttttttttttt

SEQ ID NO: 8531 - DNA, 84 bp, synthetic construct
  source 1..84: mol_type = other DNA
tttttttaagcagtggtatcaacgcagagtacnnacgaatccnnacgtgtagnntttttttttttttttttttttttttttttt

SEQ ID NO: 8532 - DNA, 84 bp, synthetic construct
  source 1..84: mol_type = other DNA
tttttttaagcagtggtatcaacgcagagtacnnacgaatccnnactacaggnntttttttttttttttttttttttttttttt

SEQ ID NO: 8533 - DNA, 84 bp, synthetic construct
  source 1..84: mol_type = other DNA
tttttttaagcagtggtatcaacgcagagtacnnacgaatccnntacaggtcnntttttttttttttttttttttttttttttt

SEQ ID NO: 8534 - DNA, 84 bp, synthetic construct
  source 1..84: mol_type = other DNA
tttttttaagcagtggtatcaacgcagagtacnnacgaatccnnctcacatgnntttttttttttttttttttttttttttttt

SEQ ID NO: 8535 - DNA, 84 bp, synthetic construct
  source 1..84: mol_type = other DNA
tttttttaagcagtggtatcaacgcagagtacnnacgaatccnnactaggagnntttttttttttttttttttttttttttttt

SEQ ID NO: 8536 - DNA, 84 bp, synthetic construct
  source 1..84: mol_type = other DNA
tttttttaagcagtggtatcaacgcagagtacnnacgaatccnnccatagganntttttttttttttttttttttttttttttt

SEQ ID NO: 8537 - DNA, 84 bp, synthetic construct
  source 1..84: mol_type = other DNA
tttttttaagcagtggtatcaacgcagagtacnnacgaatccnnggagaatcnntttttttttttttttttttttttttttttt

SEQ ID NO: 8538 - DNA, 84 bp, synthetic construct
  source 1..84: mol_type = other DNA
tttttttaagcagtggtatcaacgcagagtacnnacgaatccnngccaagaanntttttttttttttttttttttttttttttt

SEQ ID NO: 8539 - DNA, 84 bp, synthetic construct
  source 1..84: mol_type = other DNA
tttttttaagcagtggtatcaacgcagagtacnnacgaatccnnaaggcaagnntttttttttttttttttttttttttttttt

SEQ ID NO: 8540 - DNA, 84 bp, synthetic construct
  source 1..84: mol_type = other DNA
tttttttaagcagtggtatcaacgcagagtacnnacgaatccnnaatgtcgcnntttttttttttttttttttttttttttttt

SEQ ID NO: 8541 - DNA, 84 bp, synthetic construct
  source 1..84: mol_type = other DNA
tttttttaagcagtggtatcaacgcagagtacnnacgaatccnnatggaaccnntttttttttttttttttttttttttttttt

SEQ ID NO: 8542 - DNA, 84 bp, synthetic construct
  source 1..84: mol_type = other DNA
tttttttaagcagtggtatcaacgcagagtacnnacgaatccnnagaggcatnntttttttttttttttttttttttttttttt

SEQ ID NO: 8543 - DNA, 84 bp, synthetic construct
  source 1..84: mol_type = other DNA
tttttttaagcagtggtatcaacgcagagtacnnacgaatccnntgcatagcnntttttttttttttttttttttttttttttt

SEQ ID NO: 8544 - DNA, 84 bp, synthetic construct
  source 1..84: mol_type = other DNA
tttttttaagcagtggtatcaacgcagagtacnnacgaatccnnctaacgganntttttttttttttttttttttttttttttt

SEQ ID NO: 8545 - DNA, 84 bp, synthetic construct
  source 1..84: mol_type = other DNA
tttttttaagcagtggtatcaacgcagagtacnnacgaatccnntatcgaggnntttttttttttttttttttttttttttttt

SEQ ID NO: 8546 - DNA, 84 bp, synthetic construct
  source 1..84: mol_type = other DNA
tttttttaagcagtggtatcaacgcagagtacnnacgaatccnncatagcctnntttttttttttttttttttttttttttttt

SEQ ID NO: 8547 - DNA, 84 bp, synthetic construct
  source 1..84: mol_type = other DNA
tttttttaagcagtggtatcaacgcagagtacnnacgaatccnnatcgagacnntttttttttttttttttttttttttttttt

SEQ ID NO: 8548 - DNA, 84 bp, synthetic construct
  source 1..84: mol_type = other DNA
tttttttaagcagtggtatcaacgcagagtacnnacgaatccnnggaagagtnntttttttttttttttttttttttttttttt

SEQ ID NO: 8549 - DNA, 84 bp, synthetic construct
  source 1..84: mol_type = other DNA
tttttttaagcagtggtatcaacgcagagtacnnacgaatccnnccaagtagnntttttttttttttttttttttttttttttt

SEQ ID NO: 8550 - DNA, 84 bp, synthetic construct
  source 1..84: mol_type = other DNA
tttttttaagcagtggtatcaacgcagagtacnnacgaatccnnctgaacagnntttttttttttttttttttttttttttttt

SEQ ID NO: 8551 - DNA, 84 bp, synthetic construct
  source 1..84: mol_type = other DNA
tttttttaagcagtggtatcaacgcagagtacnnacgaatccnngtaggttcnntttttttttttttttttttttttttttttt

SEQ ID NO: 8552 - DNA, 84 bp, synthetic construct
  source 1..84: mol_type = other DNA
tttttttaagcagtggtatcaacgcagagtacnnacgaatccnngtatggacnntttttttttttttttttttttttttttttt

SEQ ID NO: 8553 - DNA, 84 bp, synthetic construct
  source 1..84: mol_type = other DNA
tttttttaagcagtggtatcaacgcagagtacnnacgaatccnntcgcaacanntttttttttttttttttttttttttttttt

SEQ ID NO: 8554 - DNA, 84 bp, synthetic construct
  source 1..84: mol_type = other DNA
tttttttaagcagtggtatcaacgcagagtacnnacgaatccnnccgctaatnntttttttttttttttttttttttttttttt

SEQ ID NO: 8555 - DNA, 84 bp, synthetic construct
  source 1..84: mol_type = other DNA
tttttttaagcagtggtatcaacgcagagtacnnacgaatccnngattcgcanntttttttttttttttttttttttttttttt

SEQ ID NO: 8556 - DNA, 84 bp, synthetic construct
  source 1..84: mol_type = other DNA
tttttttaagcagtggtatcaacgcagagtacnnacgaatccnncgatggaanntttttttttttttttttttttttttttttt

SEQ ID NO: 8557 - DNA, 84 bp, synthetic construct
  source 1..84: mol_type = other DNA
tttttttaagcagtggtatcaacgcagagtacnnacgaatccnnagcaagganntttttttttttttttttttttttttttttt

SEQ ID NO: 8558 - DNA, 84 bp, synthetic construct
  source 1..84: mol_type = other DNA
tttttttaagcagtggtatcaacgcagagtacnnacgaatccnncgtagcaanntttttttttttttttttttttttttttttt

SEQ ID NO: 8559 - DNA, 84 bp, synthetic construct
  source 1..84: mol_type = other DNA
tttttttaagcagtggtatcaacgcagagtacnnacgaatccnntggcagtanntttttttttttttttttttttttttttttt

SEQ ID NO: 8560 - DNA, 84 bp, synthetic construct
  source 1..84: mol_type = other DNA
tttttttaagcagtggtatcaacgcagagtacnnacgaatccnncggtagttnntttttttttttttttttttttttttttttt

SEQ ID NO: 8561 - DNA, 84 bp, synthetic construct
  source 1..84: mol_type = other DNA
tttttttaagcagtggtatcaacgcagagtacnnacgaatccnntgacttcgnntttttttttttttttttttttttttttttt

SEQ ID NO: 8562 - DNA, 84 bp, synthetic construct
  source 1..84: mol_type = other DNA
tttttttaagcagtggtatcaacgcagagtacnnacgaatccnngagtgcaanntttttttttttttttttttttttttttttt

SEQ ID NO: 8563 - DNA, 84 bp, synthetic construct
  source 1..84: mol_type = other DNA
tttttttaagcagtggtatcaacgcagagtacnnacgaatccnnacggtaacnntttttttttttttttttttttttttttttt

SEQ ID NO: 8564 - DNA, 84 bp, synthetic construct
  source 1..84: mol_type = other DNA
tttttttaagcagtggtatcaacgcagagtacnnacgaatccnnaagtggtgnntttttttttttttttttttttttttttttt

SEQ ID NO: 8565 - DNA, 84 bp, synthetic construct
  source 1..84: mol_type = other DNA
tttttttaagcagtggtatcaacgcagagtacnnacgaatccnnggagacaanntttttttttttttttttttttttttttttt

SEQ ID NO: 8566 - DNA, 84 bp, synthetic construct
  source 1..84: mol_type = other DNA
tttttttaagcagtggtatcaacgcagagtacnnacgaatccnntcaaggacnntttttttttttttttttttttttttttttt

SEQ ID NO: 8567 - DNA, 84 bp, synthetic construct
  source 1..84: mol_type = other DNA
tttttttaagcagtggtatcaacgcagagtacnnacgaatccnnaagagagcnntttttttttttttttttttttttttttttt

SEQ ID NO: 8568 - DNA, 84 bp, synthetic construct
  source 1..84: mol_type = other DNA
tttttttaagcagtggtatcaacgcagagtacnnacgaatccnncgagagatnntttttttttttttttttttttttttttttt

SEQ ID NO: 8569 - DNA, 84 bp, synthetic construct
  source 1..84: mol_type = other DNA
tttttttaagcagtggtatcaacgcagagtacnnacgaatccnnacagatggnntttttttttttttttttttttttttttttt

SEQ ID NO: 8570 - DNA, 84 bp, synthetic construct
  source 1..84: mol_type = other DNA
tttttttaagcagtggtatcaacgcagagtacnnacgaatccnnaggagtcanntttttttttttttttttttttttttttttt

SEQ ID NO: 8571 - DNA, 84 bp, synthetic construct
  source 1..84: mol_type = other DNA
tttttttaagcagtggtatcaacgcagagtacnnacgaatccnncgtgttacnntttttttttttttttttttttttttttttt

SEQ ID NO: 8572 - DNA, 84 bp, synthetic construct
  source 1..84: mol_type = other DNA
tttttttaagcagtggtatcaacgcagagtacnnacgaatccnntagtgtgcnntttttttttttttttttttttttttttttt

SEQ ID NO: 8573 - DNA, 84 bp, synthetic construct
  source 1..84: mol_type = other DNA
tttttttaagcagtggtatcaacgcagagtacnnacgaatccnnctcatgacnntttttttttttttttttttttttttttttt

SEQ ID NO: 8574 - DNA, 84 bp, synthetic construct
  source 1..84: mol_type = other DNA
tttttttaagcagtggtatcaacgcagagtacnnacgaatccnngtatccagnntttttttttttttttttttttttttttttt

SEQ ID NO: 8575 - DNA, 84 bp, synthetic construct
  source 1..84: mol_type = other DNA
tttttttaagcagtggtatcaacgcagagtacnnacgaatccnnacgcctatnntttttttttttttttttttttttttttttt

SEQ ID NO: 8576 - DNA, 84 bp, synthetic construct
  source 1..84: mol_type = other DNA
tttttttaagcagtggtatcaacgcagagtacnnacgaatccnnaacgacctnntttttttttttttttttttttttttttttt

SEQ ID NO: 8577 - DNA, 84 bp, synthetic construct
  source 1..84: mol_type = other DNA
tttttttaagcagtggtatcaacgcagagtacnnacgaatccnnatcaggctnntttttttttttttttttttttttttttttt

SEQ ID NO: 8578 - DNA, 84 bp, synthetic construct
  source 1..84: mol_type = other DNA
tttttttaagcagtggtatcaacgcagagtacnnacgaatccnncaagttcgnntttttttttttttttttttttttttttttt

SEQ ID NO: 8579 - DNA, 84 bp, synthetic construct
  source 1..84: mol_type = other DNA
tttttttaagcagtggtatcaacgcagagtacnnacgaatccnntagccaganntttttttttttttttttttttttttttttt

SEQ ID NO: 8580 - DNA, 84 bp, synthetic construct
  source 1..84: mol_type = other DNA
tttttttaagcagtggtatcaacgcagagtacnnacgaatccnncaatcacgnntttttttttttttttttttttttttttttt

SEQ ID NO: 8581 - DNA, 84 bp, synthetic construct
  source 1..84: mol_type = other DNA
tttttttaagcagtggtatcaacgcagagtacnnacgaatccnngcaacaagnntttttttttttttttttttttttttttttt

SEQ ID NO: 8582 - DNA, 84 bp, synthetic construct
  source 1..84: mol_type = other DNA
tttttttaagcagtggtatcaacgcagagtacnnacgaatccnncacgacaanntttttttttttttttttttttttttttttt

SEQ ID NO: 8583 - DNA, 84 bp, synthetic construct
  source 1..84: mol_type = other DNA
tttttttaagcagtggtatcaacgcagagtacnnacgaatccnntacggaganntttttttttttttttttttttttttttttt

SEQ ID NO: 8584 - DNA, 84 bp, synthetic construct
  source 1..84: mol_type = other DNA
tttttttaagcagtggtatcaacgcagagtacnnacgaatccnncgacaaganntttttttttttttttttttttttttttttt

SEQ ID NO: 8585 - DNA, 84 bp, synthetic construct
  source 1..84: mol_type = other DNA
tttttttaagcagtggtatcaacgcagagtacnnacgaatccnncgaagtganntttttttttttttttttttttttttttttt

SEQ ID NO: 8586 - DNA, 84 bp, synthetic construct
  source 1..84: mol_type = other DNA
tttttttaagcagtggtatcaacgcagagtacnnacgaatccnnagctggtanntttttttttttttttttttttttttttttt

SEQ ID NO: 8587 - DNA, 84 bp, synthetic construct
  source 1..84: mol_type = other DNA
tttttttaagcagtggtatcaacgcagagtacnnacgaatccnnaactaggcnntttttttttttttttttttttttttttttt

SEQ ID NO: 8588 - DNA, 84 bp, synthetic construct
  source 1..84: mol_type = other DNA
tttttttaagcagtggtatcaacgcagagtacnnacgaatccnncagcaagtnntttttttttttttttttttttttttttttt

SEQ ID NO: 8589 - DNA, 84 bp, synthetic construct
  source 1..84: mol_type = other DNA
tttttttaagcagtggtatcaacgcagagtacnnacgaatccnnacgaggtanntttttttttttttttttttttttttttttt

SEQ ID NO: 8590 - DNA, 84 bp, synthetic construct
  source 1..84: mol_type = other DNA
tttttttaagcagtggtatcaacgcagagtacnnacgaatccnncatcttccnntttttttttttttttttttttttttttttt

SEQ ID NO: 8591 - DNA, 84 bp, synthetic construct
  source 1..84: mol_type = other DNA
tttttttaagcagtggtatcaacgcagagtacnnacgaatccnncctgaatcnntttttttttttttttttttttttttttttt

SEQ ID NO: 8592 - DNA, 84 bp, synthetic construct
  source 1..84: mol_type = other DNA
tttttttaagcagtggtatcaacgcagagtacnnacgaatccnntgcagactnntttttttttttttttttttttttttttttt

SEQ ID NO: 8593 - DNA, 84 bp, synthetic construct
  source 1..84: mol_type = other DNA
tttttttaagcagtggtatcaacgcagagtacnnacgaatccnnagatgtggnntttttttttttttttttttttttttttttt

SEQ ID NO: 8594 - DNA, 84 bp, synthetic construct
  source 1..84: mol_type = other DNA
tttttttaagcagtggtatcaacgcagagtacnnacgaatccnnagttcgacnntttttttttttttttttttttttttttttt

SEQ ID NO: 8595 - DNA, 84 bp, synthetic construct
  source 1..84: mol_type = other DNA
tttttttaagcagtggtatcaacgcagagtacnnacgaatccnnacaacctcnntttttttttttttttttttttttttttttt

SEQ ID NO: 8596 - DNA, 84 bp, synthetic construct
  source 1..84: mol_type = other DNA
tttttttaagcagtggtatcaacgcagagtacnnacgaatccnncatggtagnntttttttttttttttttttttttttttttt

SEQ ID NO: 8597 - DNA, 84 bp, synthetic construct
  source 1..84: mol_type = other DNA
tttttttaagcagtggtatcaacgcagagtacnnacgaatccnncgtatctcnntttttttttttttttttttttttttttttt

SEQ ID NO: 8598 - DNA, 84 bp, synthetic construct
  source 1..84: mol_type = other DNA
tttttttaagcagtggtatcaacgcagagtacnnacgaatccnncctagttcnntttttttttttttttttttttttttttttt

SEQ ID NO: 8599 - DNA, 84 bp, synthetic construct
  source 1..84: mol_type = other DNA
tttttttaagcagtggtatcaacgcagagtacnnacgaatccnncaagagtcnntttttttttttttttttttttttttttttt

SEQ ID NO: 8600 - DNA, 84 bp, synthetic construct
  source 1..84: mol_type = other DNA
tttttttaagcagtggtatcaacgcagagtacnntaagaccgnnaatcggcanntttttttttttttttttttttttttttttt

SEQ ID NO: 8601 - DNA, 84 bp, synthetic construct
  source 1..84: mol_type = other DNA
tttttttaagcagtggtatcaacgcagagtacnntaagaccgnntacggcatnntttttttttttttttttttttttttttttt

SEQ ID NO: 8602 - DNA, 84 bp, synthetic construct
  source 1..84: mol_type = other DNA
tttttttaagcagtggtatcaacgcagagtacnntaagaccgnnttggatcgnntttttttttttttttttttttttttttttt

SEQ ID NO: 8603 - DNA, 84 bp, synthetic construct
  source 1..84: mol_type = other DNA
tttttttaagcagtggtatcaacgcagagtacnntaagaccgnntggaacganntttttttttttttttttttttttttttttt

SEQ ID NO: 8604 - DNA, 84 bp, synthetic construct
  source 1..84: mol_type = other DNA
tttttttaagcagtggtatcaacgcagagtacnntaagaccgnnggcaatcanntttttttttttttttttttttttttttttt

SEQ ID NO: 8605 - DNA, 84 bp, synthetic construct
  source 1..84: mol_type = other DNA
tttttttaagcagtggtatcaacgcagagtacnntaagaccgnngaatccganntttttttttttttttttttttttttttttt

SEQ ID NO: 8606 - DNA, 84 bp, synthetic construct
  source 1..84: mol_type = other DNA
tttttttaagcagtggtatcaacgcagagtacnntaagaccgnnttacggtgnntttttttttttttttttttttttttttttt

SEQ ID NO: 8607 - DNA, 84 bp, synthetic construct
  source 1..84: mol_type = other DNA
tttttttaagcagtggtatcaacgcagagtacnntaagaccgnncatatcggnntttttttttttttttttttttttttttttt

SEQ ID NO: 8608 - DNA, 84 bp, synthetic construct
  source 1..84: mol_type = other DNA
tttttttaagcagtggtatcaacgcagagtacnntaagaccgnncttcggtanntttttttttttttttttttttttttttttt

SEQ ID NO: 8609 - DNA, 84 bp, synthetic construct
  source 1..84: mol_type = other DNA
tttttttaagcagtggtatcaacgcagagtacnntaagaccgnntcctaacgnntttttttttttttttttttttttttttttt

SEQ ID NO: 8610 - DNA, 84 bp, synthetic construct
  source 1..84: mol_type = other DNA
tttttttaagcagtggtatcaacgcagagtacnntaagaccgnngtaagccanntttttttttttttttttttttttttttttt

SEQ ID NO: 8611 - DNA, 84 bp, synthetic construct
  source 1..84: mol_type = other DNA
tttttttaagcagtggtatcaacgcagagtacnntaagaccgnntaaggtggnntttttttttttttttttttttttttttttt

SEQ ID NO: 8612 - DNA, 84 bp, synthetic construct
  source 1..84: mol_type = other DNA
tttttttaagcagtggtatcaacgcagagtacnntaagaccgnnggtaagctnntttttttttttttttttttttttttttttt

SEQ ID NO: 8613 - DNA, 84 bp, synthetic construct
  source 1..84: mol_type = other DNA
tttttttaagcagtggtatcaacgcagagtacnntaagaccgnntgtgtcganntttttttttttttttttttttttttttttt

SEQ ID NO: 8614 - DNA, 84 bp, synthetic construct
  source 1..84: mol_type = other DNA
tttttttaagcagtggtatcaacgcagagtacnntaagaccgnngagcatganntttttttttttttttttttttttttttttt

SEQ ID NO: 8615 - DNA, 84 bp, synthetic construct
  source 1..84: mol_type = other DNA
tttttttaagcagtggtatcaacgcagagtacnntaagaccgnntcgaagtcnntttttttttttttttttttttttttttttt

SEQ ID NO: 8616 - DNA, 84 bp, synthetic construct
  source 1..84: mol_type = other DNA
tttttttaagcagtggtatcaacgcagagtacnntaagaccgnnggtgaacanntttttttttttttttttttttttttttttt

SEQ ID NO: 8617 - DNA, 84 bp, synthetic construct
  source 1..84: mol_type = other DNA
tttttttaagcagtggtatcaacgcagagtacnntaagaccgnnacatgcacnntttttttttttttttttttttttttttttt

SEQ ID NO: 8618 - DNA, 84 bp, synthetic construct
  source 1..84: mol_type = other DNA
tttttttaagcagtggtatcaacgcagagtacnntaagaccgnnccaacagtnntttttttttttttttttttttttttttttt

SEQ ID NO: 8619 - DNA, 84 bp, synthetic construct
  source 1..84: mol_type = other DNA
tttttttaagcagtggtatcaacgcagagtacnntaagaccgnnagaacagcnntttttttttttttttttttttttttttttt

SEQ ID NO: 8620 - DNA, 84 bp, synthetic construct
  source 1..84: mol_type = other DNA
tttttttaagcagtggtatcaacgcagagtacnntaagaccgnngaacacgtnntttttttttttttttttttttttttttttt

SEQ ID NO: 8621 - DNA, 84 bp, synthetic construct
  source 1..84: mol_type = other DNA
tttttttaagcagtggtatcaacgcagagtacnntaagaccgnnggtcttcanntttttttttttttttttttttttttttttt

SEQ ID NO: 8622 - DNA, 84 bp, synthetic construct
  source 1..84: mol_type = other DNA
tttttttaagcagtggtatcaacgcagagtacnntaagaccgnnaggttcagnntttttttttttttttttttttttttttttt

SEQ ID NO: 8623 - DNA, 84 bp, synthetic construct
  source 1..84: mol_type = other DNA
tttttttaagcagtggtatcaacgcagagtacnntaagaccgnnctagagcanntttttttttttttttttttttttttttttt

SEQ ID NO: 8624 - DNA, 84 bp, synthetic construct
  source 1..84: mol_type = other DNA
tttttttaagcagtggtatcaacgcagagtacnntaagaccgnncttctagcnntttttttttttttttttttttttttttttt

SEQ ID NO: 8625 - DNA, 84 bp, synthetic construct
  source 1..84: mol_type = other DNA
tttttttaagcagtggtatcaacgcagagtacnntaagaccgnngagtaacgnntttttttttttttttttttttttttttttt

SEQ ID NO: 8626 - DNA, 84 bp, synthetic construct
  source 1..84: mol_type = other DNA
tttttttaagcagtggtatcaacgcagagtacnntaagaccgnnctaagaggnntttttttttttttttttttttttttttttt

SEQ ID NO: 8627 - DNA, 84 bp, synthetic construct
  source 1..84: mol_type = other DNA
tttttttaagcagtggtatcaacgcagagtacnntaagaccgnnacgtgtagnntttttttttttttttttttttttttttttt

SEQ ID NO: 8628 - DNA, 84 bp, synthetic construct
  source 1..84: mol_type = other DNA
tttttttaagcagtggtatcaacgcagagtacnntaagaccgnnactacaggnntttttttttttttttttttttttttttttt

SEQ ID NO: 8629 - DNA, 84 bp, synthetic construct
  source 1..84: mol_type = other DNA
tttttttaagcagtggtatcaacgcagagtacnntaagaccgnntacaggtcnntttttttttttttttttttttttttttttt

SEQ ID NO: 8630 - DNA, 84 bp, synthetic construct
  source 1..84: mol_type = other DNA
tttttttaagcagtggtatcaacgcagagtacnntaagaccgnnctcacatgnntttttttttttttttttttttttttttttt

SEQ ID NO: 8631 - DNA, 84 bp, synthetic construct
  source 1..84: mol_type = other DNA
tttttttaagcagtggtatcaacgcagagtacnntaagaccgnnactaggagnntttttttttttttttttttttttttttttt

SEQ ID NO: 8632 - DNA, 84 bp, synthetic construct
  source 1..84: mol_type = other DNA
tttttttaagcagtggtatcaacgcagagtacnntaagaccgnnccatagganntttttttttttttttttttttttttttttt

SEQ ID NO: 8633 - DNA, 84 bp, synthetic construct
  source 1..84: mol_type = other DNA
tttttttaagcagtggtatcaacgcagagtacnntaagaccgnnggagaatcnntttttttttttttttttttttttttttttt

SEQ ID NO: 8634 - DNA, 84 bp, synthetic construct
  source 1..84: mol_type = other DNA
tttttttaagcagtggtatcaacgcagagtacnntaagaccgnngccaagaanntttttttttttttttttttttttttttttt

SEQ ID NO: 8635 - DNA, 84 bp, synthetic construct
  source 1..84: mol_type = other DNA
tttttttaagcagtggtatcaacgcagagtacnntaagaccgnnaaggcaagnntttttttttttttttttttttttttttttt

SEQ ID NO: 8636 - DNA, 84 bp, synthetic construct
  source 1..84: mol_type = other DNA
tttttttaagcagtggtatcaacgcagagtacnntaagaccgnnaatgtcgcnntttttttttttttttttttttttttttttt

SEQ ID NO: 8637 - DNA, 84 bp, synthetic construct
  source 1..84: mol_type = other DNA
tttttttaagcagtggtatcaacgcagagtacnntaagaccgnnatggaaccnntttttttttttttttttttttttttttttt

SEQ ID NO: 8638 - DNA, 84 bp, synthetic construct
  source 1..84: mol_type = other DNA
tttttttaagcagtggtatcaacgcagagtacnntaagaccgnnagaggcatnntttttttttttttttttttttttttttttt

SEQ ID NO: 8639 - DNA, 84 bp, synthetic construct
  source 1..84: mol_type = other DNA
tttttttaagcagtggtatcaacgcagagtacnntaagaccgnntgcatagcnntttttttttttttttttttttttttttttt

SEQ ID NO: 8640 - DNA, 84 bp, synthetic construct
  source 1..84: mol_type = other DNA
tttttttaagcagtggtatcaacgcagagtacnntaagaccgnnctaacgganntttttttttttttttttttttttttttttt

SEQ ID NO: 8641 - DNA, 84 bp, synthetic construct
  source 1..84: mol_type = other DNA
tttttttaagcagtggtatcaacgcagagtacnntaagaccgnntatcgaggnntttttttttttttttttttttttttttttt

SEQ ID NO: 8642 - DNA, 84 bp, synthetic construct
  source 1..84: mol_type = other DNA
tttttttaagcagtggtatcaacgcagagtacnntaagaccgnncatagcctnntttttttttttttttttttttttttttttt

SEQ ID NO: 8643 - DNA, 84 bp, synthetic construct
  source 1..84: mol_type = other DNA
tttttttaagcagtggtatcaacgcagagtacnntaagaccgnnatcgagacnntttttttttttttttttttttttttttttt

SEQ ID NO: 8644 - DNA, 84 bp, synthetic construct
  source 1..84: mol_type = other DNA
tttttttaagcagtggtatcaacgcagagtacnntaagaccgnnggaagagtnntttttttttttttttttttttttttttttt

SEQ ID NO: 8645 - DNA, 84 bp, synthetic construct
  source 1..84: mol_type = other DNA
tttttttaagcagtggtatcaacgcagagtacnntaagaccgnnccaagtagnntttttttttttttttttttttttttttttt

SEQ ID NO: 8646 - DNA, 84 bp, synthetic construct
  source 1..84: mol_type = other DNA
tttttttaagcagtggtatcaacgcagagtacnntaagaccgnnctgaacagnntttttttttttttttttttttttttttttt

SEQ ID NO: 8647 - DNA, 84 bp, synthetic construct
  source 1..84: mol_type = other DNA
tttttttaagcagtggtatcaacgcagagtacnntaagaccgnngtaggttcnntttttttttttttttttttttttttttttt

SEQ ID NO: 8648 - DNA, 84 bp, synthetic construct
  source 1..84: mol_type = other DNA
tttttttaagcagtggtatcaacgcagagtacnntaagaccgnngtatggacnntttttttttttttttttttttttttttttt

SEQ ID NO: 8649 - DNA, 84 bp, synthetic construct
  source 1..84: mol_type = other DNA
tttttttaagcagtggtatcaacgcagagtacnntaagaccgnntcgcaacanntttttttttttttttttttttttttttttt

SEQ ID NO: 8650 - DNA, 84 bp, synthetic construct
  source 1..84: mol_type = other DNA
tttttttaagcagtggtatcaacgcagagtacnntaagaccgnnccgctaatnntttttttttttttttttttttttttttttt

SEQ ID NO: 8651 - DNA, 84 bp, synthetic construct
  source 1..84: mol_type = other DNA
tttttttaagcagtggtatcaacgcagagtacnntaagaccgnngattcgcanntttttttttttttttttttttttttttttt

SEQ ID NO: 8652 - DNA, 84 bp, synthetic construct
  source 1..84: mol_type = other DNA
tttttttaagcagtggtatcaacgcagagtacnntaagaccgnncgatggaanntttttttttttttttttttttttttttttt

SEQ ID NO: 8653 - DNA, 84 bp, synthetic construct
  source 1..84: mol_type = other DNA
tttttttaagcagtggtatcaacgcagagtacnntaagaccgnnagcaagganntttttttttttttttttttttttttttttt

SEQ ID NO: 8654 - DNA, 84 bp, synthetic construct
  source 1..84: mol_type = other DNA
tttttttaagcagtggtatcaacgcagagtacnntaagaccgnncgtagcaanntttttttttttttttttttttttttttttt

SEQ ID NO: 8655 - DNA, 84 bp, synthetic construct
  source 1..84: mol_type = other DNA
tttttttaagcagtggtatcaacgcagagtacnntaagaccgnntggcagtanntttttttttttttttttttttttttttttt

SEQ ID NO: 8656 - DNA, 84 bp, synthetic construct
  source 1..84: mol_type = other DNA
tttttttaagcagtggtatcaacgcagagtacnntaagaccgnncggtagttnntttttttttttttttttttttttttttttt

SEQ ID NO: 8657 - DNA, 84 bp, synthetic construct
  source 1..84: mol_type = other DNA
tttttttaagcagtggtatcaacgcagagtacnntaagaccgnntgacttcgnntttttttttttttttttttttttttttttt

SEQ ID NO: 8658 - DNA, 84 bp, synthetic construct
  source 1..84: mol_type = other DNA
tttttttaagcagtggtatcaacgcagagtacnntaagaccgnngagtgcaanntttttttttttttttttttttttttttttt

SEQ ID NO: 8659 - DNA, 84 bp, synthetic construct
  source 1..84: mol_type = other DNA
tttttttaagcagtggtatcaacgcagagtacnntaagaccgnnacggtaacnntttttttttttttttttttttttttttttt

SEQ ID NO: 8660 - DNA, 84 bp, synthetic construct
  source 1..84: mol_type = other DNA
tttttttaagcagtggtatcaacgcagagtacnntaagaccgnnaagtggtgnntttttttttttttttttttttttttttttt

SEQ ID NO: 8661 - DNA, 84 bp, synthetic construct
  source 1..84: mol_type = other DNA
tttttttaagcagtggtatcaacgcagagtacnntaagaccgnnggagacaanntttttttttttttttttttttttttttttt

SEQ ID NO: 8662 - DNA, 84 bp, synthetic construct
  source 1..84: mol_type = other DNA
tttttttaagcagtggtatcaacgcagagtacnntaagaccgnntcaaggacnntttttttttttttttttttttttttttttt

SEQ ID NO: 8663 - DNA, 84 bp, synthetic construct
  source 1..84: mol_type = other DNA
tttttttaagcagtggtatcaacgcagagtacnntaagaccgnnaagagagcnntttttttttttttttttttttttttttttt

SEQ ID NO: 8664 - DNA, 84 bp, synthetic construct
  source 1..84: mol_type = other DNA
tttttttaagcagtggtatcaacgcagagtacnntaagaccgnncgagagatnntttttttttttttttttttttttttttttt

SEQ ID NO: 8665 - DNA, 84 bp, synthetic construct
  source 1..84: mol_type = other DNA
tttttttaagcagtggtatcaacgcagagtacnntaagaccgnnacagatggnntttttttttttttttttttttttttttttt

SEQ ID NO: 8666 - DNA, 84 bp, synthetic construct
  source 1..84: mol_type = other DNA
tttttttaagcagtggtatcaacgcagagtacnntaagaccgnnaggagtcanntttttttttttttttttttttttttttttt

SEQ ID NO: 8667 - DNA, 84 bp, synthetic construct
  source 1..84: mol_type = other DNA
tttttttaagcagtggtatcaacgcagagtacnntaagaccgnncgtgttacnntttttttttttttttttttttttttttttt

SEQ ID NO: 8668 - DNA, 84 bp, synthetic construct
  source 1..84: mol_type = other DNA
tttttttaagcagtggtatcaacgcagagtacnntaagaccgnntagtgtgcnntttttttttttttttttttttttttttttt

SEQ ID NO: 8669 - DNA, 84 bp, synthetic construct
  source 1..84: mol_type = other DNA
tttttttaagcagtggtatcaacgcagagtacnntaagaccgnnctcatgacnntttttttttttttttttttttttttttttt

SEQ ID NO: 8670 - DNA, 84 bp, synthetic construct
  source 1..84: mol_type = other DNA
tttttttaagcagtggtatcaacgcagagtacnntaagaccgnngtatccagnntttttttttttttttttttttttttttttt

SEQ ID NO: 8671 - DNA, 84 bp, synthetic construct
  source 1..84: mol_type = other DNA
tttttttaagcagtggtatcaacgcagagtacnntaagaccgnnacgcctatnntttttttttttttttttttttttttttttt

SEQ ID NO: 8672 - DNA, 84 bp, synthetic construct
  source 1..84: mol_type = other DNA
tttttttaagcagtggtatcaacgcagagtacnntaagaccgnnaacgacctnntttttttttttttttttttttttttttttt

SEQ ID NO: 8673 - DNA, 84 bp, synthetic construct
  source 1..84: mol_type = other DNA
tttttttaagcagtggtatcaacgcagagtacnntaagaccgnnatcaggctnntttttttttttttttttttttttttttttt

SEQ ID NO: 8674 - DNA, 84 bp, synthetic construct
  source 1..84: mol_type = other DNA
tttttttaagcagtggtatcaacgcagagtacnntaagaccgnncaagttcgnntttttttttttttttttttttttttttttt

SEQ ID NO: 8675 - DNA, 84 bp, synthetic construct
  source 1..84: mol_type = other DNA
tttttttaagcagtggtatcaacgcagagtacnntaagaccgnntagccaganntttttttttttttttttttttttttttttt

SEQ ID NO: 8676 - DNA, 84 bp, synthetic construct
  source 1..84: mol_type = other DNA
tttttttaagcagtggtatcaacgcagagtacnntaagaccgnncaatcacgnntttttttttttttttttttttttttttttt

SEQ ID NO: 8677 - DNA, 84 bp, synthetic construct
  source 1..84: mol_type = other DNA
tttttttaagcagtggtatcaacgcagagtacnntaagaccgnngcaacaagnntttttttttttttttttttttttttttttt

SEQ ID NO: 8678 - DNA, 84 bp, synthetic construct
  source 1..84: mol_type = other DNA
tttttttaagcagtggtatcaacgcagagtacnntaagaccgnncacgacaanntttttttttttttttttttttttttttttt

SEQ ID NO: 8679 - DNA, 84 bp, synthetic construct
  source 1..84: mol_type = other DNA
tttttttaagcagtggtatcaacgcagagtacnntaagaccgnntacggaganntttttttttttttttttttttttttttttt

SEQ ID NO: 8680 - DNA, 84 bp, synthetic construct
  source 1..84: mol_type = other DNA
tttttttaagcagtggtatcaacgcagagtacnntaagaccgnncgacaaganntttttttttttttttttttttttttttttt

SEQ ID NO: 8681 - DNA, 84 bp, synthetic construct
  source 1..84: mol_type = other DNA
tttttttaagcagtggtatcaacgcagagtacnntaagaccgnncgaagtganntttttttttttttttttttttttttttttt

SEQ ID NO: 8682 - DNA, 84 bp, synthetic construct
  source 1..84: mol_type = other DNA
tttttttaagcagtggtatcaacgcagagtacnntaagaccgnnagctggtanntttttttttttttttttttttttttttttt

SEQ ID NO: 8683 - DNA, 84 bp, synthetic construct
  source 1..84: mol_type = other DNA
tttttttaagcagtggtatcaacgcagagtacnntaagaccgnnaactaggcnntttttttttttttttttttttttttttttt

SEQ ID NO: 8684 - DNA, 84 bp, synthetic construct
  source 1..84: mol_type = other DNA
tttttttaagcagtggtatcaacgcagagtacnntaagaccgnncagcaagtnntttttttttttttttttttttttttttttt

SEQ ID NO: 8685 - DNA, 84 bp, synthetic construct
  source 1..84: mol_type = other DNA
tttttttaagcagtggtatcaacgcagagtacnntaagaccgnnacgaggtanntttttttttttttttttttttttttttttt

SEQ ID NO: 8686 - DNA, 84 bp, synthetic construct
  source 1..84: mol_type = other DNA
tttttttaagcagtggtatcaacgcagagtacnntaagaccgnncatcttccnntttttttttttttttttttttttttttttt

SEQ ID NO: 8687 - DNA, 84 bp, synthetic construct
  source 1..84: mol_type = other DNA
tttttttaagcagtggtatcaacgcagagtacnntaagaccgnncctgaatcnntttttttttttttttttttttttttttttt

SEQ ID NO: 8688 - DNA, 84 bp, synthetic construct
  source 1..84: mol_type = other DNA
tttttttaagcagtggtatcaacgcagagtacnntaagaccgnntgcagactnntttttttttttttttttttttttttttttt

SEQ ID NO: 8689 - DNA, 84 bp, synthetic construct
  source 1..84: mol_type = other DNA
tttttttaagcagtggtatcaacgcagagtacnntaagaccgnnagatgtggnntttttttttttttttttttttttttttttt

SEQ ID NO: 8690 - DNA, 84 bp, synthetic construct
  source 1..84: mol_type = other DNA
tttttttaagcagtggtatcaacgcagagtacnntaagaccgnnagttcgacnntttttttttttttttttttttttttttttt

SEQ ID NO: 8691 - DNA, 84 bp, synthetic construct
  source 1..84: mol_type = other DNA
tttttttaagcagtggtatcaacgcagagtacnntaagaccgnnacaacctcnntttttttttttttttttttttttttttttt

SEQ ID NO: 8692 - DNA, 84 bp, synthetic construct
  source 1..84: mol_type = other DNA
tttttttaagcagtggtatcaacgcagagtacnntaagaccgnncatggtagnntttttttttttttttttttttttttttttt

SEQ ID NO: 8693 - DNA, 84 bp, synthetic construct
  source 1..84: mol_type = other DNA
tttttttaagcagtggtatcaacgcagagtacnntaagaccgnncgtatctcnntttttttttttttttttttttttttttttt

SEQ ID NO: 8694 - DNA, 84 bp, synthetic construct
  source 1..84: mol_type = other DNA
tttttttaagcagtggtatcaacgcagagtacnntaagaccgnncctagttcnntttttttttttttttttttttttttttttt

SEQ ID NO: 8695 - DNA, 84 bp, synthetic construct
  source 1..84: mol_type = other DNA
tttttttaagcagtggtatcaacgcagagtacnntaagaccgnncaagagtcnntttttttttttttttttttttttttttttt

SEQ ID NO: 8696 - DNA, 84 bp, synthetic construct
  source 1..84: mol_type = other DNA
tttttttaagcagtggtatcaacgcagagtacnntctatggcnnaatcggcanntttttttttttttttttttttttttttttt

SEQ ID NO: 8697 - DNA, 84 bp, synthetic construct
  source 1..84: mol_type = other DNA
tttttttaagcagtggtatcaacgcagagtacnntctatggcnntacggcatnntttttttttttttttttttttttttttttt

SEQ ID NO: 8698 - DNA, 84 bp, synthetic construct
  source 1..84: mol_type = other DNA
tttttttaagcagtggtatcaacgcagagtacnntctatggcnnttggatcgnntttttttttttttttttttttttttttttt

SEQ ID NO: 8699 - DNA, 84 bp, synthetic construct
  source 1..84: mol_type = other DNA
tttttttaagcagtggtatcaacgcagagtacnntctatggcnntggaacganntttttttttttttttttttttttttttttt

SEQ ID NO: 8700 - DNA, 84 bp, synthetic construct
  source 1..84: mol_type = other DNA
tttttttaagcagtggtatcaacgcagagtacnntctatggcnnggcaatcanntttttttttttttttttttttttttttttt

SEQ ID NO: 8701 - DNA, 84 bp, synthetic construct
  source 1..84: mol_type = other DNA
tttttttaagcagtggtatcaacgcagagtacnntctatggcnngaatccganntttttttttttttttttttttttttttttt

SEQ ID NO: 8702 - DNA, 84 bp, synthetic construct
  source 1..84: mol_type = other DNA
tttttttaagcagtggtatcaacgcagagtacnntctatggcnnttacggtgnntttttttttttttttttttttttttttttt

SEQ ID NO: 8703 - DNA, 84 bp, synthetic construct
  source 1..84: mol_type = other DNA
tttttttaagcagtggtatcaacgcagagtacnntctatggcnncatatcggnntttttttttttttttttttttttttttttt

SEQ ID NO: 8704 - DNA, 84 bp, synthetic construct
  source 1..84: mol_type = other DNA
tttttttaagcagtggtatcaacgcagagtacnntctatggcnncttcggtanntttttttttttttttttttttttttttttt

SEQ ID NO: 8705 - DNA, 84 bp, synthetic construct
  source 1..84: mol_type = other DNA
tttttttaagcagtggtatcaacgcagagtacnntctatggcnntcctaacgnntttttttttttttttttttttttttttttt

SEQ ID NO: 8706 - DNA, 84 bp, synthetic construct
  source 1..84: mol_type = other DNA
tttttttaagcagtggtatcaacgcagagtacnntctatggcnngtaagccanntttttttttttttttttttttttttttttt

SEQ ID NO: 8707 - DNA, 84 bp, synthetic construct
  source 1..84: mol_type = other DNA
tttttttaagcagtggtatcaacgcagagtacnntctatggcnntaaggtggnntttttttttttttttttttttttttttttt

SEQ ID NO: 8708 - DNA, 84 bp, synthetic construct
  source 1..84: mol_type = other DNA
tttttttaagcagtggtatcaacgcagagtacnntctatggcnnggtaagctnntttttttttttttttttttttttttttttt

SEQ ID NO: 8709 - DNA, 84 bp, synthetic construct
  source 1..84: mol_type = other DNA
tttttttaagcagtggtatcaacgcagagtacnntctatggcnntgtgtcganntttttttttttttttttttttttttttttt

SEQ ID NO: 8710 - DNA, 84 bp, synthetic construct
  source 1..84: mol_type = other DNA
tttttttaagcagtggtatcaacgcagagtacnntctatggcnngagcatganntttttttttttttttttttttttttttttt

SEQ ID NO: 8711 - DNA, 84 bp, synthetic construct
  source 1..84: mol_type = other DNA
tttttttaagcagtggtatcaacgcagagtacnntctatggcnntcgaagtcnntttttttttttttttttttttttttttttt

SEQ ID NO: 8712 - DNA, 84 bp, synthetic construct
  source 1..84: mol_type = other DNA
tttttttaagcagtggtatcaacgcagagtacnntctatggcnnggtgaacanntttttttttttttttttttttttttttttt

SEQ ID NO: 8713 - DNA, 84 bp, synthetic construct
  source 1..84: mol_type = other DNA
tttttttaagcagtggtatcaacgcagagtacnntctatggcnnacatgcacnntttttttttttttttttttttttttttttt

SEQ ID NO: 8714 - DNA, 84 bp, synthetic construct
  source 1..84: mol_type = other DNA
tttttttaagcagtggtatcaacgcagagtacnntctatggcnnccaacagtnntttttttttttttttttttttttttttttt

SEQ ID NO: 8715 - DNA, 84 bp, synthetic construct
  source 1..84: mol_type = other DNA
tttttttaagcagtggtatcaacgcagagtacnntctatggcnnagaacagcnntttttttttttttttttttttttttttttt

SEQ ID NO: 8716 - DNA, 84 bp, synthetic construct
  source 1..84: mol_type = other DNA
tttttttaagcagtggtatcaacgcagagtacnntctatggcnngaacacgtnntttttttttttttttttttttttttttttt

SEQ ID NO: 8717 - DNA, 84 bp, synthetic construct
  source 1..84: mol_type = other DNA
tttttttaagcagtggtatcaacgcagagtacnntctatggcnnggtcttcanntttttttttttttttttttttttttttttt

SEQ ID NO: 8718 - DNA, 84 bp, synthetic construct
  source 1..84: mol_type = other DNA
tttttttaagcagtggtatcaacgcagagtacnntctatggcnnaggttcagnntttttttttttttttttttttttttttttt

SEQ ID NO: 8719 - DNA, 84 bp, synthetic construct
  source 1..84: mol_type = other DNA
tttttttaagcagtggtatcaacgcagagtacnntctatggcnnctagagcanntttttttttttttttttttttttttttttt

SEQ ID NO: 8720 - DNA, 84 bp, synthetic construct
  source 1..84: mol_type = other DNA
tttttttaagcagtggtatcaacgcagagtacnntctatggcnncttctagcnntttttttttttttttttttttttttttttt

SEQ ID NO: 8721 - DNA, 84 bp, synthetic construct
  source 1..84: mol_type = other DNA
tttttttaagcagtggtatcaacgcagagtacnntctatggcnngagtaacgnntttttttttttttttttttttttttttttt

SEQ ID NO: 8722 - DNA, 84 bp, synthetic construct
  source 1..84: mol_type = other DNA
tttttttaagcagtggtatcaacgcagagtacnntctatggcnnctaagaggnntttttttttttttttttttttttttttttt

SEQ ID NO: 8723 - DNA, 84 bp, synthetic construct
  source 1..84: mol_type = other DNA
tttttttaagcagtggtatcaacgcagagtacnntctatggcnnacgtgtagnntttttttttttttttttttttttttttttt

SEQ ID NO: 8724 - DNA, 84 bp, synthetic construct
  source 1..84: mol_type = other DNA
tttttttaagcagtggtatcaacgcagagtacnntctatggcnnactacaggnntttttttttttttttttttttttttttttt

SEQ ID NO: 8725 - DNA, 84 bp, synthetic construct
  source 1..84: mol_type = other DNA
tttttttaagcagtggtatcaacgcagagtacnntctatggcnntacaggtcnntttttttttttttttttttttttttttttt

SEQ ID NO: 8726 - DNA, 84 bp, synthetic construct
  source 1..84: mol_type = other DNA
tttttttaagcagtggtatcaacgcagagtacnntctatggcnnctcacatgnntttttttttttttttttttttttttttttt

SEQ ID NO: 8727 - DNA, 84 bp, synthetic construct
  source 1..84: mol_type = other DNA
tttttttaagcagtggtatcaacgcagagtacnntctatggcnnactaggagnntttttttttttttttttttttttttttttt

SEQ ID NO: 8728 - DNA, 84 bp, synthetic construct
  source 1..84: mol_type = other DNA
tttttttaagcagtggtatcaacgcagagtacnntctatggcnnccatagganntttttttttttttttttttttttttttttt

SEQ ID NO: 8729 - DNA, 84 bp, synthetic construct
  source 1..84: mol_type = other DNA
tttttttaagcagtggtatcaacgcagagtacnntctatggcnnggagaatcnntttttttttttttttttttttttttttttt

SEQ ID NO: 8730 - DNA, 84 bp, synthetic construct
  source 1..84: mol_type = other DNA
tttttttaagcagtggtatcaacgcagagtacnntctatggcnngccaagaanntttttttttttttttttttttttttttttt

SEQ ID NO: 8731 - DNA, 84 bp, synthetic construct
  source 1..84: mol_type = other DNA
tttttttaagcagtggtatcaacgcagagtacnntctatggcnnaaggcaagnntttttttttttttttttttttttttttttt

SEQ ID NO: 8732 - DNA, 84 bp, synthetic construct
  source 1..84: mol_type = other DNA
tttttttaagcagtggtatcaacgcagagtacnntctatggcnnaatgtcgcnntttttttttttttttttttttttttttttt

SEQ ID NO: 8733 - DNA, 84 bp, synthetic construct
  source 1..84: mol_type = other DNA
tttttttaagcagtggtatcaacgcagagtacnntctatggcnnatggaaccnntttttttttttttttttttttttttttttt

SEQ ID NO: 8734 - DNA, 84 bp, synthetic construct
  source 1..84: mol_type = other DNA
tttttttaagcagtggtatcaacgcagagtacnntctatggcnnagaggcatnntttttttttttttttttttttttttttttt

SEQ ID NO: 8735 - DNA, 84 bp, synthetic construct
  source 1..84: mol_type = other DNA
tttttttaagcagtggtatcaacgcagagtacnntctatggcnntgcatagcnntttttttttttttttttttttttttttttt

SEQ ID NO: 8736 - DNA, 84 bp, synthetic construct
  source 1..84: mol_type = other DNA
tttttttaagcagtggtatcaacgcagagtacnntctatggcnnctaacgganntttttttttttttttttttttttttttttt

SEQ ID NO: 8737 - DNA, 84 bp, synthetic construct
  source 1..84: mol_type = other DNA
tttttttaagcagtggtatcaacgcagagtacnntctatggcnntatcgaggnntttttttttttttttttttttttttttttt

SEQ ID NO: 8738 - DNA, 84 bp, synthetic construct
  source 1..84: mol_type = other DNA
tttttttaagcagtggtatcaacgcagagtacnntctatggcnncatagcctnntttttttttttttttttttttttttttttt

SEQ ID NO: 8739 - DNA, 84 bp, synthetic construct
  source 1..84: mol_type = other DNA
tttttttaagcagtggtatcaacgcagagtacnntctatggcnnatcgagacnntttttttttttttttttttttttttttttt

SEQ ID NO: 8740 - DNA, 84 bp, synthetic construct
  source 1..84: mol_type = other DNA
tttttttaagcagtggtatcaacgcagagtacnntctatggcnnggaagagtnntttttttttttttttttttttttttttttt

SEQ ID NO: 8741 - DNA, 84 bp, synthetic construct
  source 1..84: mol_type = other DNA
tttttttaagcagtggtatcaacgcagagtacnntctatggcnnccaagtagnntttttttttttttttttttttttttttttt

SEQ ID NO: 8742 - DNA, 84 bp, synthetic construct
  source 1..84: mol_type = other DNA
tttttttaagcagtggtatcaacgcagagtacnntctatggcnnctgaacagnntttttttttttttttttttttttttttttt

SEQ ID NO: 8743 - DNA, 84 bp, synthetic construct
  source 1..84: mol_type = other DNA
tttttttaagcagtggtatcaacgcagagtacnntctatggcnngtaggttcnntttttttttttttttttttttttttttttt

SEQ ID NO: 8744 - DNA, 84 bp, synthetic construct
  source 1..84: mol_type = other DNA
tttttttaagcagtggtatcaacgcagagtacnntctatggcnngtatggacnntttttttttttttttttttttttttttttt

SEQ ID NO: 8745 - DNA, 84 bp, synthetic construct
  source 1..84: mol_type = other DNA
tttttttaagcagtggtatcaacgcagagtacnntctatggcnntcgcaacanntttttttttttttttttttttttttttttt

SEQ ID NO: 8746 - DNA, 84 bp, synthetic construct
  source 1..84: mol_type = other DNA
tttttttaagcagtggtatcaacgcagagtacnntctatggcnnccgctaatnntttttttttttttttttttttttttttttt

SEQ ID NO: 8747 - DNA, 84 bp, synthetic construct
  source 1..84: mol_type = other DNA
tttttttaagcagtggtatcaacgcagagtacnntctatggcnngattcgcanntttttttttttttttttttttttttttttt

SEQ ID NO: 8748 - DNA, 84 bp, synthetic construct
  source 1..84: mol_type = other DNA
tttttttaagcagtggtatcaacgcagagtacnntctatggcnncgatggaanntttttttttttttttttttttttttttttt

SEQ ID NO: 8749 - DNA, 84 bp, synthetic construct
  source 1..84: mol_type = other DNA
tttttttaagcagtggtatcaacgcagagtacnntctatggcnnagcaagganntttttttttttttttttttttttttttttt

SEQ ID NO: 8750 - DNA, 84 bp, synthetic construct
  source 1..84: mol_type = other DNA
tttttttaagcagtggtatcaacgcagagtacnntctatggcnncgtagcaanntttttttttttttttttttttttttttttt

SEQ ID NO: 8751 - DNA, 84 bp, synthetic construct
  source 1..84: mol_type = other DNA
tttttttaagcagtggtatcaacgcagagtacnntctatggcnntggcagtanntttttttttttttttttttttttttttttt

SEQ ID NO: 8752 - DNA, 84 bp, synthetic construct
  source 1..84: mol_type = other DNA
tttttttaagcagtggtatcaacgcagagtacnntctatggcnncggtagttnntttttttttttttttttttttttttttttt

SEQ ID NO: 8753 - DNA, 84 bp, synthetic construct
  source 1..84: mol_type = other DNA
tttttttaagcagtggtatcaacgcagagtacnntctatggcnntgacttcgnntttttttttttttttttttttttttttttt

SEQ ID NO: 8754 - DNA, 84 bp, synthetic construct
  source 1..84: mol_type = other DNA
tttttttaagcagtggtatcaacgcagagtacnntctatggcnngagtgcaanntttttttttttttttttttttttttttttt

SEQ ID NO: 8755 - DNA, 84 bp, synthetic construct
  source 1..84: mol_type = other DNA
tttttttaagcagtggtatcaacgcagagtacnntctatggcnnacggtaacnntttttttttttttttttttttttttttttt

SEQ ID NO: 8756 - DNA, 84 bp, synthetic construct
  source 1..84: mol_type = other DNA
tttttttaagcagtggtatcaacgcagagtacnntctatggcnnaagtggtgnntttttttttttttttttttttttttttttt

SEQ ID NO: 8757 - DNA, 84 bp, synthetic construct
  source 1..84: mol_type = other DNA
tttttttaagcagtggtatcaacgcagagtacnntctatggcnnggagacaanntttttttttttttttttttttttttttttt

SEQ ID NO: 8758 - DNA, 84 bp, synthetic construct
  source 1..84: mol_type = other DNA
tttttttaagcagtggtatcaacgcagagtacnntctatggcnntcaaggacnntttttttttttttttttttttttttttttt

SEQ ID NO: 8759 - DNA, 84 bp, synthetic construct
  source 1..84: mol_type = other DNA
tttttttaagcagtggtatcaacgcagagtacnntctatggcnnaagagagcnntttttttttttttttttttttttttttttt

SEQ ID NO: 8760 - DNA, 84 bp, synthetic construct
  source 1..84: mol_type = other DNA
tttttttaagcagtggtatcaacgcagagtacnntctatggcnncgagagatnntttttttttttttttttttttttttttttt

SEQ ID NO: 8761 - DNA, 84 bp, synthetic construct
  source 1..84: mol_type = other DNA
tttttttaagcagtggtatcaacgcagagtacnntctatggcnnacagatggnntttttttttttttttttttttttttttttt

SEQ ID NO: 8762 - DNA, 84 bp, synthetic construct
  source 1..84: mol_type = other DNA
tttttttaagcagtggtatcaacgcagagtacnntctatggcnnaggagtcanntttttttttttttttttttttttttttttt

SEQ ID NO: 8763 - DNA, 84 bp, synthetic construct
  source 1..84: mol_type = other DNA
tttttttaagcagtggtatcaacgcagagtacnntctatggcnncgtgttacnntttttttttttttttttttttttttttttt

SEQ ID NO: 8764 - DNA, 84 bp, synthetic construct
  source 1..84: mol_type = other DNA
tttttttaagcagtggtatcaacgcagagtacnntctatggcnntagtgtgcnntttttttttttttttttttttttttttttt

SEQ ID NO: 8765 - DNA, 84 bp, synthetic construct
  source 1..84: mol_type = other DNA
tttttttaagcagtggtatcaacgcagagtacnntctatggcnnctcatgacnntttttttttttttttttttttttttttttt

SEQ ID NO: 8766 - DNA, 84 bp, synthetic construct
  source 1..84: mol_type = other DNA
tttttttaagcagtggtatcaacgcagagtacnntctatggcnngtatccagnntttttttttttttttttttttttttttttt

SEQ ID NO: 8767 - DNA, 84 bp, synthetic construct
  source 1..84: mol_type = other DNA
tttttttaagcagtggtatcaacgcagagtacnntctatggcnnacgcctatnntttttttttttttttttttttttttttttt

SEQ ID NO: 8768 - DNA, 84 bp, synthetic construct
  source 1..84: mol_type = other DNA
tttttttaagcagtggtatcaacgcagagtacnntctatggcnnaacgacctnntttttttttttttttttttttttttttttt

SEQ ID NO: 8769 - DNA, 84 bp, synthetic construct
  source 1..84: mol_type = other DNA
tttttttaagcagtggtatcaacgcagagtacnntctatggcnnatcaggctnntttttttttttttttttttttttttttttt

SEQ ID NO: 8770 - DNA, 84 bp, synthetic construct
  source 1..84: mol_type = other DNA
tttttttaagcagtggtatcaacgcagagtacnntctatggcnncaagttcgnntttttttttttttttttttttttttttttt

SEQ ID NO: 8771 - DNA, 84 bp, synthetic construct
  source 1..84: mol_type = other DNA
tttttttaagcagtggtatcaacgcagagtacnntctatggcnntagccaganntttttttttttttttttttttttttttttt

SEQ ID NO: 8772 - DNA, 84 bp, synthetic construct
  source 1..84: mol_type = other DNA
tttttttaagcagtggtatcaacgcagagtacnntctatggcnncaatcacgnntttttttttttttttttttttttttttttt

SEQ ID NO: 8773 - DNA, 84 bp, synthetic construct
  source 1..84: mol_type = other DNA
tttttttaagcagtggtatcaacgcagagtacnntctatggcnngcaacaagnntttttttttttttttttttttttttttttt

SEQ ID NO: 8774 - DNA, 84 bp, synthetic construct
  source 1..84: mol_type = other DNA
tttttttaagcagtggtatcaacgcagagtacnntctatggcnncacgacaanntttttttttttttttttttttttttttttt

SEQ ID NO: 8775 - DNA, 84 bp, synthetic construct
  source 1..84: mol_type = other DNA
tttttttaagcagtggtatcaacgcagagtacnntctatggcnntacggaganntttttttttttttttttttttttttttttt

SEQ ID NO: 8776 - DNA, 84 bp, synthetic construct
  source 1..84: mol_type = other DNA
tttttttaagcagtggtatcaacgcagagtacnntctatggcnncgacaaganntttttttttttttttttttttttttttttt

SEQ ID NO: 8777 - DNA, 84 bp, synthetic construct
  source 1..84: mol_type = other DNA
tttttttaagcagtggtatcaacgcagagtacnntctatggcnncgaagtganntttttttttttttttttttttttttttttt

SEQ ID NO: 8778 - DNA, 84 bp, synthetic construct
  source 1..84: mol_type = other DNA
tttttttaagcagtggtatcaacgcagagtacnntctatggcnnagctggtanntttttttttttttttttttttttttttttt

SEQ ID NO: 8779 - DNA, 84 bp, synthetic construct
  source 1..84: mol_type = other DNA
tttttttaagcagtggtatcaacgcagagtacnntctatggcnnaactaggcnntttttttttttttttttttttttttttttt

SEQ ID NO: 8780 - DNA, 84 bp, synthetic construct
  source 1..84: mol_type = other DNA
tttttttaagcagtggtatcaacgcagagtacnntctatggcnncagcaagtnntttttttttttttttttttttttttttttt

SEQ ID NO: 8781 - DNA, 84 bp, synthetic construct
  source 1..84: mol_type = other DNA
tttttttaagcagtggtatcaacgcagagtacnntctatggcnnacgaggtanntttttttttttttttttttttttttttttt

SEQ ID NO: 8782 - DNA, 84 bp, synthetic construct
  source 1..84: mol_type = other DNA
tttttttaagcagtggtatcaacgcagagtacnntctatggcnncatcttccnntttttttttttttttttttttttttttttt

SEQ ID NO: 8783 - DNA, 84 bp, synthetic construct
  source 1..84: mol_type = other DNA
tttttttaagcagtggtatcaacgcagagtacnntctatggcnncctgaatcnntttttttttttttttttttttttttttttt

SEQ ID NO: 8784 - DNA, 84 bp, synthetic construct
  source 1..84: mol_type = other DNA
tttttttaagcagtggtatcaacgcagagtacnntctatggcnntgcagactnntttttttttttttttttttttttttttttt

SEQ ID NO: 8785 - DNA, 84 bp, synthetic construct
  source 1..84: mol_type = other DNA
tttttttaagcagtggtatcaacgcagagtacnntctatggcnnagatgtggnntttttttttttttttttttttttttttttt

SEQ ID NO: 8786 - DNA, 84 bp, synthetic construct
  source 1..84: mol_type = other DNA
tttttttaagcagtggtatcaacgcagagtacnntctatggcnnagttcgacnntttttttttttttttttttttttttttttt

SEQ ID NO: 8787 - DNA, 84 bp, synthetic construct
  source 1..84: mol_type = other DNA
tttttttaagcagtggtatcaacgcagagtacnntctatggcnnacaacctcnntttttttttttttttttttttttttttttt

SEQ ID NO: 8788 - DNA, 84 bp, synthetic construct
  source 1..84: mol_type = other DNA
tttttttaagcagtggtatcaacgcagagtacnntctatggcnncatggtagnntttttttttttttttttttttttttttttt

SEQ ID NO: 8789 - DNA, 84 bp, synthetic construct
  source 1..84: mol_type = other DNA
tttttttaagcagtggtatcaacgcagagtacnntctatggcnncgtatctcnntttttttttttttttttttttttttttttt

SEQ ID NO: 8790 - DNA, 84 bp, synthetic construct
  source 1..84: mol_type = other DNA
tttttttaagcagtggtatcaacgcagagtacnntctatggcnncctagttcnntttttttttttttttttttttttttttttt

SEQ ID NO: 8791 - DNA, 84 bp, synthetic construct
  source 1..84: mol_type = other DNA
tttttttaagcagtggtatcaacgcagagtacnntctatggcnncaagagtcnntttttttttttttttttttttttttttttt

SEQ ID NO: 8792 - DNA, 84 bp, synthetic construct
  source 1..84: mol_type = other DNA
tttttttaagcagtggtatcaacgcagagtacnncaaggatgnnaatcggcanntttttttttttttttttttttttttttttt

SEQ ID NO: 8793 - DNA, 84 bp, synthetic construct
  source 1..84: mol_type = other DNA
tttttttaagcagtggtatcaacgcagagtacnncaaggatgnntacggcatnntttttttttttttttttttttttttttttt

SEQ ID NO: 8794 - DNA, 84 bp, synthetic construct
  source 1..84: mol_type = other DNA
tttttttaagcagtggtatcaacgcagagtacnncaaggatgnnttggatcgnntttttttttttttttttttttttttttttt

SEQ ID NO: 8795 - DNA, 84 bp, synthetic construct
  source 1..84: mol_type = other DNA
tttttttaagcagtggtatcaacgcagagtacnncaaggatgnntggaacganntttttttttttttttttttttttttttttt

SEQ ID NO: 8796 - DNA, 84 bp, synthetic construct
  source 1..84: mol_type = other DNA
tttttttaagcagtggtatcaacgcagagtacnncaaggatgnnggcaatcanntttttttttttttttttttttttttttttt

SEQ ID NO: 8797 - DNA, 84 bp, synthetic construct
  source 1..84: mol_type = other DNA
tttttttaagcagtggtatcaacgcagagtacnncaaggatgnngaatccganntttttttttttttttttttttttttttttt

SEQ ID NO: 8798 - DNA, 84 bp, synthetic construct
  source 1..84: mol_type = other DNA
tttttttaagcagtggtatcaacgcagagtacnncaaggatgnnttacggtgnntttttttttttttttttttttttttttttt

SEQ ID NO: 8799 - DNA, 84 bp, synthetic construct
  source 1..84: mol_type = other DNA
tttttttaagcagtggtatcaacgcagagtacnncaaggatgnncatatcggnntttttttttttttttttttttttttttttt

SEQ ID NO: 8800 - DNA, 84 bp, synthetic construct
  source 1..84: mol_type = other DNA
tttttttaagcagtggtatcaacgcagagtacnncaaggatgnncttcggtanntttttttttttttttttttttttttttttt

SEQ ID NO: 8801 - DNA, 84 bp, synthetic construct
  source 1..84: mol_type = other DNA
tttttttaagcagtggtatcaacgcagagtacnncaaggatgnntcctaacgnntttttttttttttttttttttttttttttt

SEQ ID NO: 8802 - DNA, 84 bp, synthetic construct
  source 1..84: mol_type = other DNA
tttttttaagcagtggtatcaacgcagagtacnncaaggatgnngtaagccanntttttttttttttttttttttttttttttt

SEQ ID NO: 8803 - DNA, 84 bp, synthetic construct
  source 1..84: mol_type = other DNA
tttttttaagcagtggtatcaacgcagagtacnncaaggatgnntaaggtggnntttttttttttttttttttttttttttttt

SEQ ID NO: 8804 - DNA, 84 bp, synthetic construct
  source 1..84: mol_type = other DNA
tttttttaagcagtggtatcaacgcagagtacnncaaggatgnnggtaagctnntttttttttttttttttttttttttttttt

SEQ ID NO: 8805 - DNA, 84 bp, synthetic construct
  source 1..84: mol_type = other DNA
tttttttaagcagtggtatcaacgcagagtacnncaaggatgnntgtgtcganntttttttttttttttttttttttttttttt

SEQ ID NO: 8806 - DNA, 84 bp, synthetic construct
  source 1..84: mol_type = other DNA
tttttttaagcagtggtatcaacgcagagtacnncaaggatgnngagcatganntttttttttttttttttttttttttttttt

SEQ ID NO: 8807 - DNA, 84 bp, synthetic construct
  source 1..84: mol_type = other DNA
tttttttaagcagtggtatcaacgcagagtacnncaaggatgnntcgaagtcnntttttttttttttttttttttttttttttt

SEQ ID NO: 8808 - DNA, 84 bp, synthetic construct
  source 1..84: mol_type = other DNA
tttttttaagcagtggtatcaacgcagagtacnncaaggatgnnggtgaacanntttttttttttttttttttttttttttttt

SEQ ID NO: 8809 - DNA, 84 bp, synthetic construct
  source 1..84: mol_type = other DNA
tttttttaagcagtggtatcaacgcagagtacnncaaggatgnnacatgcacnntttttttttttttttttttttttttttttt

SEQ ID NO: 8810 - DNA, 84 bp, synthetic construct
  source 1..84: mol_type = other DNA
tttttttaagcagtggtatcaacgcagagtacnncaaggatgnnccaacagtnntttttttttttttttttttttttttttttt

SEQ ID NO: 8811 - DNA, 84 bp, synthetic construct
  source 1..84: mol_type = other DNA
tttttttaagcagtggtatcaacgcagagtacnncaaggatgnnagaacagcnntttttttttttttttttttttttttttttt

SEQ ID NO: 8812 - DNA, 84 bp, synthetic construct
  source 1..84: mol_type = other DNA
tttttttaagcagtggtatcaacgcagagtacnncaaggatgnngaacacgtnntttttttttttttttttttttttttttttt

SEQ ID NO: 8813 - DNA, 84 bp, synthetic construct
  source 1..84: mol_type = other DNA
tttttttaagcagtggtatcaacgcagagtacnncaaggatgnnggtcttcanntttttttttttttttttttttttttttttt

SEQ ID NO: 8814 - DNA, 84 bp, synthetic construct
  source 1..84: mol_type = other DNA
tttttttaagcagtggtatcaacgcagagtacnncaaggatgnnaggttcagnntttttttttttttttttttttttttttttt

SEQ ID NO: 8815 - DNA, 84 bp, synthetic construct
  source 1..84: mol_type = other DNA
tttttttaagcagtggtatcaacgcagagtacnncaaggatgnnctagagcanntttttttttttttttttttttttttttttt

SEQ ID NO: 8816 - DNA, 84 bp, synthetic construct
  source 1..84: mol_type = other DNA
tttttttaagcagtggtatcaacgcagagtacnncaaggatgnncttctagcnntttttttttttttttttttttttttttttt

SEQ ID NO: 8817 - DNA, 84 bp, synthetic construct
  source 1..84: mol_type = other DNA
tttttttaagcagtggtatcaacgcagagtacnncaaggatgnngagtaacgnntttttttttttttttttttttttttttttt

SEQ ID NO: 8818 - DNA, 84 bp, synthetic construct
  source 1..84: mol_type = other DNA
tttttttaagcagtggtatcaacgcagagtacnncaaggatgnnctaagaggnntttttttttttttttttttttttttttttt

SEQ ID NO: 8819 - DNA, 84 bp, synthetic construct
  source 1..84: mol_type = other DNA
tttttttaagcagtggtatcaacgcagagtacnncaaggatgnnacgtgtagnntttttttttttttttttttttttttttttt

SEQ ID NO: 8820 - DNA, 84 bp, synthetic construct
  source 1..84: mol_type = other DNA
tttttttaagcagtggtatcaacgcagagtacnncaaggatgnnactacaggnntttttttttttttttttttttttttttttt

SEQ ID NO: 8821 - DNA, 84 bp, synthetic construct
  source 1..84: mol_type = other DNA
tttttttaagcagtggtatcaacgcagagtacnncaaggatgnntacaggtcnntttttttttttttttttttttttttttttt

SEQ ID NO: 8822 - DNA, 84 bp, synthetic construct
  source 1..84: mol_type = other DNA
tttttttaagcagtggtatcaacgcagagtacnncaaggatgnnctcacatgnntttttttttttttttttttttttttttttt

SEQ ID NO: 8823 - DNA, 84 bp, synthetic construct
  source 1..84: mol_type = other DNA
tttttttaagcagtggtatcaacgcagagtacnncaaggatgnnactaggagnntttttttttttttttttttttttttttttt

SEQ ID NO: 8824 - DNA, 84 bp, synthetic construct
  source 1..84: mol_type = other DNA
tttttttaagcagtggtatcaacgcagagtacnncaaggatgnnccatagganntttttttttttttttttttttttttttttt

SEQ ID NO: 8825 - DNA, 84 bp, synthetic construct
  source 1..84: mol_type = other DNA
tttttttaagcagtggtatcaacgcagagtacnncaaggatgnnggagaatcnntttttttttttttttttttttttttttttt

SEQ ID NO: 8826 - DNA, 84 bp, synthetic construct
  source 1..84: mol_type = other DNA
tttttttaagcagtggtatcaacgcagagtacnncaaggatgnngccaagaanntttttttttttttttttttttttttttttt

SEQ ID NO: 8827 - DNA, 84 bp, synthetic construct
  source 1..84: mol_type = other DNA
tttttttaagcagtggtatcaacgcagagtacnncaaggatgnnaaggcaagnntttttttttttttttttttttttttttttt

SEQ ID NO: 8828 - DNA, 84 bp, synthetic construct
  source 1..84: mol_type = other DNA
tttttttaagcagtggtatcaacgcagagtacnncaaggatgnnaatgtcgcnntttttttttttttttttttttttttttttt

SEQ ID NO: 8829 - DNA, 84 bp, synthetic construct
  source 1..84: mol_type = other DNA
tttttttaagcagtggtatcaacgcagagtacnncaaggatgnnatggaaccnntttttttttttttttttttttttttttttt

SEQ ID NO: 8830 - DNA, 84 bp, synthetic construct
  source 1..84: mol_type = other DNA
tttttttaagcagtggtatcaacgcagagtacnncaaggatgnnagaggcatnntttttttttttttttttttttttttttttt

SEQ ID NO: 8831 - DNA, 84 bp, synthetic construct
  source 1..84: mol_type = other DNA
tttttttaagcagtggtatcaacgcagagtacnncaaggatgnntgcatagcnntttttttttttttttttttttttttttttt

SEQ ID NO: 8832 - DNA, 84 bp, synthetic construct
  source 1..84: mol_type = other DNA
tttttttaagcagtggtatcaacgcagagtacnncaaggatgnnctaacgganntttttttttttttttttttttttttttttt

SEQ ID NO: 8833 - DNA, 84 bp, synthetic construct
  source 1..84: mol_type = other DNA
tttttttaagcagtggtatcaacgcagagtacnncaaggatgnntatcgaggnntttttttttttttttttttttttttttttt

SEQ ID NO: 8834 - DNA, 84 bp, synthetic construct
  source 1..84: mol_type = other DNA
tttttttaagcagtggtatcaacgcagagtacnncaaggatgnncatagcctnntttttttttttttttttttttttttttttt

SEQ ID NO: 8835 - DNA, 84 bp, synthetic construct
  source 1..84: mol_type = other DNA
tttttttaagcagtggtatcaacgcagagtacnncaaggatgnnatcgagacnntttttttttttttttttttttttttttttt

SEQ ID NO: 8836 - DNA, 84 bp, synthetic construct
  source 1..84: mol_type = other DNA
tttttttaagcagtggtatcaacgcagagtacnncaaggatgnnggaagagtnntttttttttttttttttttttttttttttt

SEQ ID NO: 8837 - DNA, 84 bp, synthetic construct
  source 1..84: mol_type = other DNA
tttttttaagcagtggtatcaacgcagagtacnncaaggatgnnccaagtagnntttttttttttttttttttttttttttttt

SEQ ID NO: 8838 - DNA, 84 bp, synthetic construct
  source 1..84: mol_type = other DNA
tttttttaagcagtggtatcaacgcagagtacnncaaggatgnnctgaacagnntttttttttttttttttttttttttttttt

SEQ ID NO: 8839 - DNA, 84 bp, synthetic construct
  source 1..84: mol_type = other DNA
tttttttaagcagtggtatcaacgcagagtacnncaaggatgnngtaggttcnntttttttttttttttttttttttttttttt

SEQ ID NO: 8840 - DNA, 84 bp, synthetic construct
  source 1..84: mol_type = other DNA
tttttttaagcagtggtatcaacgcagagtacnncaaggatgnngtatggacnntttttttttttttttttttttttttttttt

SEQ ID NO: 8841 - DNA, 84 bp, synthetic construct
  source 1..84: mol_type = other DNA
tttttttaagcagtggtatcaacgcagagtacnncaaggatgnntcgcaacanntttttttttttttttttttttttttttttt

SEQ ID NO: 8842 - DNA, 84 bp, synthetic construct
  source 1..84: mol_type = other DNA
tttttttaagcagtggtatcaacgcagagtacnncaaggatgnnccgctaatnntttttttttttttttttttttttttttttt

SEQ ID NO: 8843 - DNA, 84 bp, synthetic construct
  source 1..84: mol_type = other DNA
tttttttaagcagtggtatcaacgcagagtacnncaaggatgnngattcgcanntttttttttttttttttttttttttttttt

SEQ ID NO: 8844 - DNA, 84 bp, synthetic construct
  source 1..84: mol_type = other DNA
tttttttaagcagtggtatcaacgcagagtacnncaaggatgnncgatggaanntttttttttttttttttttttttttttttt

SEQ ID NO: 8845 - DNA, 84 bp, synthetic construct
  source 1..84: mol_type = other DNA
tttttttaagcagtggtatcaacgcagagtacnncaaggatgnnagcaagganntttttttttttttttttttttttttttttt

SEQ ID NO: 8846 - DNA, 84 bp, synthetic construct
  source 1..84: mol_type = other DNA
tttttttaagcagtggtatcaacgcagagtacnncaaggatgnncgtagcaanntttttttttttttttttttttttttttttt

SEQ ID NO: 8847 - DNA, 84 bp, synthetic construct
  source 1..84: mol_type = other DNA
tttttttaagcagtggtatcaacgcagagtacnncaaggatgnntggcagtanntttttttttttttttttttttttttttttt

SEQ ID NO: 8848 - DNA, 84 bp, synthetic construct
  source 1..84: mol_type = other DNA
tttttttaagcagtggtatcaacgcagagtacnncaaggatgnncggtagttnntttttttttttttttttttttttttttttt

SEQ ID NO: 8849 - DNA, 84 bp, synthetic construct
  source 1..84: mol_type = other DNA
tttttttaagcagtggtatcaacgcagagtacnncaaggatgnntgacttcgnntttttttttttttttttttttttttttttt

SEQ ID NO: 8850 - DNA, 84 bp, synthetic construct
  source 1..84: mol_type = other DNA
tttttttaagcagtggtatcaacgcagagtacnncaaggatgnngagtgcaanntttttttttttttttttttttttttttttt

SEQ ID NO: 8851 - DNA, 84 bp, synthetic construct
  source 1..84: mol_type = other DNA
tttttttaagcagtggtatcaacgcagagtacnncaaggatgnnacggtaacnntttttttttttttttttttttttttttttt

SEQ ID NO: 8852 - DNA, 84 bp, synthetic construct
  source 1..84: mol_type = other DNA
tttttttaagcagtggtatcaacgcagagtacnncaaggatgnnaagtggtgnntttttttttttttttttttttttttttttt

SEQ ID NO: 8853 - DNA, 84 bp, synthetic construct
  source 1..84: mol_type = other DNA
tttttttaagcagtggtatcaacgcagagtacnncaaggatgnnggagacaanntttttttttttttttttttttttttttttt

SEQ ID NO: 8854 - DNA, 84 bp, synthetic construct
  source 1..84: mol_type = other DNA
tttttttaagcagtggtatcaacgcagagtacnncaaggatgnntcaaggacnntttttttttttttttttttttttttttttt

SEQ ID NO: 8855 - DNA, 84 bp, synthetic construct
  source 1..84: mol_type = other DNA
tttttttaagcagtggtatcaacgcagagtacnncaaggatgnnaagagagcnntttttttttttttttttttttttttttttt

SEQ ID NO: 8856 - DNA, 84 bp, synthetic construct
  source 1..84: mol_type = other DNA
tttttttaagcagtggtatcaacgcagagtacnncaaggatgnncgagagatnntttttttttttttttttttttttttttttt

SEQ ID NO: 8857 - DNA, 84 bp, synthetic construct
  source 1..84: mol_type = other DNA
tttttttaagcagtggtatcaacgcagagtacnncaaggatgnnacagatggnntttttttttttttttttttttttttttttt

SEQ ID NO: 8858 - DNA, 84 bp, synthetic construct
  source 1..84: mol_type = other DNA
tttttttaagcagtggtatcaacgcagagtacnncaaggatgnnaggagtcanntttttttttttttttttttttttttttttt

SEQ ID NO: 8859 - DNA, 84 bp, synthetic construct
  source 1..84: mol_type = other DNA
tttttttaagcagtggtatcaacgcagagtacnncaaggatgnncgtgttacnntttttttttttttttttttttttttttttt

SEQ ID NO: 8860 - DNA, 84 bp, synthetic construct
  source 1..84: mol_type = other DNA
tttttttaagcagtggtatcaacgcagagtacnncaaggatgnntagtgtgcnntttttttttttttttttttttttttttttt

SEQ ID NO: 8861 - DNA, 84 bp, synthetic construct
  source 1..84: mol_type = other DNA
tttttttaagcagtggtatcaacgcagagtacnncaaggatgnnctcatgacnntttttttttttttttttttttttttttttt

SEQ ID NO: 8862 - DNA, 84 bp, synthetic construct
  source 1..84: mol_type = other DNA
tttttttaagcagtggtatcaacgcagagtacnncaaggatgnngtatccagnntttttttttttttttttttttttttttttt

SEQ ID NO: 8863 - DNA, 84 bp, synthetic construct
  source 1..84: mol_type = other DNA
tttttttaagcagtggtatcaacgcagagtacnncaaggatgnnacgcctatnntttttttttttttttttttttttttttttt

SEQ ID NO: 8864 - DNA, 84 bp, synthetic construct
  source 1..84: mol_type = other DNA
tttttttaagcagtggtatcaacgcagagtacnncaaggatgnnaacgacctnntttttttttttttttttttttttttttttt

SEQ ID NO: 8865 - DNA, 84 bp, synthetic construct
  source 1..84: mol_type = other DNA
tttttttaagcagtggtatcaacgcagagtacnncaaggatgnnatcaggctnntttttttttttttttttttttttttttttt

SEQ ID NO: 8866 - DNA, 84 bp, synthetic construct
  source 1..84: mol_type = other DNA
tttttttaagcagtggtatcaacgcagagtacnncaaggatgnncaagttcgnntttttttttttttttttttttttttttttt

SEQ ID NO: 8867 - DNA, 84 bp, synthetic construct
  source 1..84: mol_type = other DNA
tttttttaagcagtggtatcaacgcagagtacnncaaggatgnntagccaganntttttttttttttttttttttttttttttt

SEQ ID NO: 8868 - DNA, 84 bp, synthetic construct
  source 1..84: mol_type = other DNA
tttttttaagcagtggtatcaacgcagagtacnncaaggatgnncaatcacgnntttttttttttttttttttttttttttttt

SEQ ID NO: 8869 - DNA, 84 bp, synthetic construct
  source 1..84: mol_type = other DNA
tttttttaagcagtggtatcaacgcagagtacnncaaggatgnngcaacaagnntttttttttttttttttttttttttttttt

SEQ ID NO: 8870 - DNA, 84 bp, synthetic construct
  source 1..84: mol_type = other DNA
tttttttaagcagtggtatcaacgcagagtacnncaaggatgnncacgacaanntttttttttttttttttttttttttttttt

SEQ ID NO: 8871 - DNA, 84 bp, synthetic construct
  source 1..84: mol_type = other DNA
tttttttaagcagtggtatcaacgcagagtacnncaaggatgnntacggaganntttttttttttttttttttttttttttttt

SEQ ID NO: 8872 - DNA, 84 bp, synthetic construct
  source 1..84: mol_type = other DNA
tttttttaagcagtggtatcaacgcagagtacnncaaggatgnncgacaaganntttttttttttttttttttttttttttttt

SEQ ID NO: 8873 - DNA, 84 bp, synthetic construct
  source 1..84: mol_type = other DNA
tttttttaagcagtggtatcaacgcagagtacnncaaggatgnncgaagtganntttttttttttttttttttttttttttttt

SEQ ID NO: 8874 - DNA, 84 bp, synthetic construct
  source 1..84: mol_type = other DNA
tttttttaagcagtggtatcaacgcagagtacnncaaggatgnnagctggtanntttttttttttttttttttttttttttttt

SEQ ID NO: 8875 - DNA, 84 bp, synthetic construct
  source 1..84: mol_type = other DNA
tttttttaagcagtggtatcaacgcagagtacnncaaggatgnnaactaggcnntttttttttttttttttttttttttttttt

SEQ ID NO: 8876 - DNA, 84 bp, synthetic construct
  source 1..84: mol_type = other DNA
tttttttaagcagtggtatcaacgcagagtacnncaaggatgnncagcaagtnntttttttttttttttttttttttttttttt

SEQ ID NO: 8877 - DNA, 84 bp, synthetic construct
  source 1..84: mol_type = other DNA
tttttttaagcagtggtatcaacgcagagtacnncaaggatgnnacgaggtanntttttttttttttttttttttttttttttt

SEQ ID NO: 8878 - DNA, 84 bp, synthetic construct
  source 1..84: mol_type = other DNA
tttttttaagcagtggtatcaacgcagagtacnncaaggatgnncatcttccnntttttttttttttttttttttttttttttt

SEQ ID NO: 8879 - DNA, 84 bp, synthetic construct
  source 1..84: mol_type = other DNA
tttttttaagcagtggtatcaacgcagagtacnncaaggatgnncctgaatcnntttttttttttttttttttttttttttttt

SEQ ID NO: 8880 - DNA, 84 bp, synthetic construct
  source 1..84: mol_type = other DNA
tttttttaagcagtggtatcaacgcagagtacnncaaggatgnntgcagactnntttttttttttttttttttttttttttttt

SEQ ID NO: 8881 - DNA, 84 bp, synthetic construct
  source 1..84: mol_type = other DNA
tttttttaagcagtggtatcaacgcagagtacnncaaggatgnnagatgtggnntttttttttttttttttttttttttttttt

SEQ ID NO: 8882 - DNA, 84 bp, synthetic construct
  source 1..84: mol_type = other DNA
tttttttaagcagtggtatcaacgcagagtacnncaaggatgnnagttcgacnntttttttttttttttttttttttttttttt

SEQ ID NO: 8883 - DNA, 84 bp, synthetic construct
  source 1..84: mol_type = other DNA
tttttttaagcagtggtatcaacgcagagtacnncaaggatgnnacaacctcnntttttttttttttttttttttttttttttt

SEQ ID NO: 8884 - DNA, 84 bp, synthetic construct
  source 1..84: mol_type = other DNA
tttttttaagcagtggtatcaacgcagagtacnncaaggatgnncatggtagnntttttttttttttttttttttttttttttt

SEQ ID NO: 8885 - DNA, 84 bp, synthetic construct
  source 1..84: mol_type = other DNA
tttttttaagcagtggtatcaacgcagagtacnncaaggatgnncgtatctcnntttttttttttttttttttttttttttttt

SEQ ID NO: 8886 - DNA, 84 bp, synthetic construct
  source 1..84: mol_type = other DNA
tttttttaagcagtggtatcaacgcagagtacnncaaggatgnncctagttcnntttttttttttttttttttttttttttttt

SEQ ID NO: 8887 - DNA, 84 bp, synthetic construct
  source 1..84: mol_type = other DNA
tttttttaagcagtggtatcaacgcagagtacnncaaggatgnncaagagtcnntttttttttttttttttttttttttttttt

SEQ ID NO: 8888 - DNA, 84 bp, synthetic construct
  source 1..84: mol_type = other DNA
tttttttaagcagtggtatcaacgcagagtacnntcagaaccnnaatcggcanntttttttttttttttttttttttttttttt

SEQ ID NO: 8889 - DNA, 84 bp, synthetic construct
  source 1..84: mol_type = other DNA
tttttttaagcagtggtatcaacgcagagtacnntcagaaccnntacggcatnntttttttttttttttttttttttttttttt

SEQ ID NO: 8890 - DNA, 84 bp, synthetic construct
  source 1..84: mol_type = other DNA
tttttttaagcagtggtatcaacgcagagtacnntcagaaccnnttggatcgnntttttttttttttttttttttttttttttt

SEQ ID NO: 8891 - DNA, 84 bp, synthetic construct
  source 1..84: mol_type = other DNA
tttttttaagcagtggtatcaacgcagagtacnntcagaaccnntggaacganntttttttttttttttttttttttttttttt

SEQ ID NO: 8892 - DNA, 84 bp, synthetic construct
  source 1..84: mol_type = other DNA
tttttttaagcagtggtatcaacgcagagtacnntcagaaccnnggcaatcanntttttttttttttttttttttttttttttt

SEQ ID NO: 8893 - DNA, 84 bp, synthetic construct
  source 1..84: mol_type = other DNA
tttttttaagcagtggtatcaacgcagagtacnntcagaaccnngaatccganntttttttttttttttttttttttttttttt

SEQ ID NO: 8894 - DNA, 84 bp, synthetic construct
  source 1..84: mol_type = other DNA
tttttttaagcagtggtatcaacgcagagtacnntcagaaccnnttacggtgnntttttttttttttttttttttttttttttt

SEQ ID NO: 8895 - DNA, 84 bp, synthetic construct
  source 1..84: mol_type = other DNA
tttttttaagcagtggtatcaacgcagagtacnntcagaaccnncatatcggnntttttttttttttttttttttttttttttt

SEQ ID NO: 8896 - DNA, 84 bp, synthetic construct
  source 1..84: mol_type = other DNA
tttttttaagcagtggtatcaacgcagagtacnntcagaaccnncttcggtanntttttttttttttttttttttttttttttt

SEQ ID NO: 8897 - DNA, 84 bp, synthetic construct
  source 1..84: mol_type = other DNA
tttttttaagcagtggtatcaacgcagagtacnntcagaaccnntcctaacgnntttttttttttttttttttttttttttttt

SEQ ID NO: 8898 - DNA, 84 bp, synthetic construct
  source 1..84: mol_type = other DNA
tttttttaagcagtggtatcaacgcagagtacnntcagaaccnngtaagccanntttttttttttttttttttttttttttttt

SEQ ID NO: 8899 - DNA, 84 bp, synthetic construct
  source 1..84: mol_type = other DNA
tttttttaagcagtggtatcaacgcagagtacnntcagaaccnntaaggtggnntttttttttttttttttttttttttttttt

SEQ ID NO: 8900 - DNA, 84 bp, synthetic construct
  source 1..84: mol_type = other DNA
tttttttaagcagtggtatcaacgcagagtacnntcagaaccnnggtaagctnntttttttttttttttttttttttttttttt

SEQ ID NO: 8901 - DNA, 84 bp, synthetic construct
  source 1..84: mol_type = other DNA
tttttttaagcagtggtatcaacgcagagtacnntcagaaccnntgtgtcganntttttttttttttttttttttttttttttt

SEQ ID NO: 8902 - DNA, 84 bp, synthetic construct
  source 1..84: mol_type = other DNA
tttttttaagcagtggtatcaacgcagagtacnntcagaaccnngagcatganntttttttttttttttttttttttttttttt

SEQ ID NO: 8903 - DNA, 84 bp, synthetic construct
  source 1..84: mol_type = other DNA
tttttttaagcagtggtatcaacgcagagtacnntcagaaccnntcgaagtcnntttttttttttttttttttttttttttttt

SEQ ID NO: 8904 - DNA, 84 bp, synthetic construct
  source 1..84: mol_type = other DNA
tttttttaagcagtggtatcaacgcagagtacnntcagaaccnnggtgaacanntttttttttttttttttttttttttttttt

SEQ ID NO: 8905 - DNA, 84 bp, synthetic construct
  source 1..84: mol_type = other DNA
tttttttaagcagtggtatcaacgcagagtacnntcagaaccnnacatgcacnntttttttttttttttttttttttttttttt

SEQ ID NO: 8906 - DNA, 84 bp, synthetic construct
  source 1..84: mol_type = other DNA
tttttttaagcagtggtatcaacgcagagtacnntcagaaccnnccaacagtnntttttttttttttttttttttttttttttt

SEQ ID NO: 8907 - DNA, 84 bp, synthetic construct
  source 1..84: mol_type = other DNA
tttttttaagcagtggtatcaacgcagagtacnntcagaaccnnagaacagcnntttttttttttttttttttttttttttttt

SEQ ID NO: 8908 - DNA, 84 bp, synthetic construct
  source 1..84: mol_type = other DNA
tttttttaagcagtggtatcaacgcagagtacnntcagaaccnngaacacgtnntttttttttttttttttttttttttttttt

SEQ ID NO: 8909 - DNA, 84 bp, synthetic construct
  source 1..84: mol_type = other DNA
tttttttaagcagtggtatcaacgcagagtacnntcagaaccnnggtcttcanntttttttttttttttttttttttttttttt

SEQ ID NO: 8910 - DNA, 84 bp, synthetic construct
  source 1..84: mol_type = other DNA
tttttttaagcagtggtatcaacgcagagtacnntcagaaccnnaggttcagnntttttttttttttttttttttttttttttt

SEQ ID NO: 8911 - DNA, 84 bp, synthetic construct
  source 1..84: mol_type = other DNA
tttttttaagcagtggtatcaacgcagagtacnntcagaaccnnctagagcanntttttttttttttttttttttttttttttt

SEQ ID NO: 8912 - DNA, 84 bp, synthetic construct
  source 1..84: mol_type = other DNA
tttttttaagcagtggtatcaacgcagagtacnntcagaaccnncttctagcnntttttttttttttttttttttttttttttt

SEQ ID NO: 8913 - DNA, 84 bp, synthetic construct
  source 1..84: mol_type = other DNA
tttttttaagcagtggtatcaacgcagagtacnntcagaaccnngagtaacgnntttttttttttttttttttttttttttttt

SEQ ID NO: 8914 - DNA, 84 bp, synthetic construct
  source 1..84: mol_type = other DNA
tttttttaagcagtggtatcaacgcagagtacnntcagaaccnnctaagaggnntttttttttttttttttttttttttttttt

SEQ ID NO: 8915 - DNA, 84 bp, synthetic construct
  source 1..84: mol_type = other DNA
tttttttaagcagtggtatcaacgcagagtacnntcagaaccnnacgtgtagnntttttttttttttttttttttttttttttt

SEQ ID NO: 8916 - DNA, 84 bp, synthetic construct
  source 1..84: mol_type = other DNA
tttttttaagcagtggtatcaacgcagagtacnntcagaaccnnactacaggnntttttttttttttttttttttttttttttt

SEQ ID NO: 8917 - DNA, 84 bp, synthetic construct
  source 1..84: mol_type = other DNA
tttttttaagcagtggtatcaacgcagagtacnntcagaaccnntacaggtcnntttttttttttttttttttttttttttttt

SEQ ID NO: 8918 - DNA, 84 bp, synthetic construct
  source 1..84: mol_type = other DNA
tttttttaagcagtggtatcaacgcagagtacnntcagaaccnnctcacatgnntttttttttttttttttttttttttttttt

SEQ ID NO: 8919 - DNA, 84 bp, synthetic construct
  source 1..84: mol_type = other DNA
tttttttaagcagtggtatcaacgcagagtacnntcagaaccnnactaggagnntttttttttttttttttttttttttttttt

SEQ ID NO: 8920 - DNA, 84 bp, synthetic construct
  source 1..84: mol_type = other DNA
tttttttaagcagtggtatcaacgcagagtacnntcagaaccnnccatagganntttttttttttttttttttttttttttttt

SEQ ID NO: 8921 - DNA, 84 bp, synthetic construct
  source 1..84: mol_type = other DNA
tttttttaagcagtggtatcaacgcagagtacnntcagaaccnnggagaatcnntttttttttttttttttttttttttttttt

SEQ ID NO: 8922 - DNA, 84 bp, synthetic construct
  source 1..84: mol_type = other DNA
tttttttaagcagtggtatcaacgcagagtacnntcagaaccnngccaagaanntttttttttttttttttttttttttttttt

SEQ ID NO: 8923 - DNA, 84 bp, synthetic construct
  source 1..84: mol_type = other DNA
tttttttaagcagtggtatcaacgcagagtacnntcagaaccnnaaggcaagnntttttttttttttttttttttttttttttt

SEQ ID NO: 8924 - DNA, 84 bp, synthetic construct
  source 1..84: mol_type = other DNA
tttttttaagcagtggtatcaacgcagagtacnntcagaaccnnaatgtcgcnntttttttttttttttttttttttttttttt

SEQ ID NO: 8925 - DNA, 84 bp, synthetic construct
  source 1..84: mol_type = other DNA
tttttttaagcagtggtatcaacgcagagtacnntcagaaccnnatggaaccnntttttttttttttttttttttttttttttt

SEQ ID NO: 8926 - DNA, 84 bp, synthetic construct
  source 1..84: mol_type = other DNA
tttttttaagcagtggtatcaacgcagagtacnntcagaaccnnagaggcatnntttttttttttttttttttttttttttttt

SEQ ID NO: 8927 - DNA, 84 bp, synthetic construct
  source 1..84: mol_type = other DNA
tttttttaagcagtggtatcaacgcagagtacnntcagaaccnntgcatagcnntttttttttttttttttttttttttttttt

SEQ ID NO: 8928 - DNA, 84 bp, synthetic construct
  source 1..84: mol_type = other DNA
tttttttaagcagtggtatcaacgcagagtacnntcagaaccnnctaacgganntttttttttttttttttttttttttttttt

SEQ ID NO: 8929 - DNA, 84 bp, synthetic construct
  source 1..84: mol_type = other DNA
tttttttaagcagtggtatcaacgcagagtacnntcagaaccnntatcgaggnntttttttttttttttttttttttttttttt

SEQ ID NO: 8930 - DNA, 84 bp, synthetic construct
  source 1..84: mol_type = other DNA
tttttttaagcagtggtatcaacgcagagtacnntcagaaccnncatagcctnntttttttttttttttttttttttttttttt

SEQ ID NO: 8931 - DNA, 84 bp, synthetic construct
  source 1..84: mol_type = other DNA
tttttttaagcagtggtatcaacgcagagtacnntcagaaccnnatcgagacnntttttttttttttttttttttttttttttt

SEQ ID NO: 8932 - DNA, 84 bp, synthetic construct
  source 1..84: mol_type = other DNA
tttttttaagcagtggtatcaacgcagagtacnntcagaaccnnggaagagtnntttttttttttttttttttttttttttttt

SEQ ID NO: 8933 - DNA, 84 bp, synthetic construct
  source 1..84: mol_type = other DNA
tttttttaagcagtggtatcaacgcagagtacnntcagaaccnnccaagtagnntttttttttttttttttttttttttttttt

SEQ ID NO: 8934 - DNA, 84 bp, synthetic construct
  source 1..84: mol_type = other DNA
tttttttaagcagtggtatcaacgcagagtacnntcagaaccnnctgaacagnntttttttttttttttttttttttttttttt

SEQ ID NO: 8935 - DNA, 84 bp, synthetic construct
  source 1..84: mol_type = other DNA
tttttttaagcagtggtatcaacgcagagtacnntcagaaccnngtaggttcnntttttttttttttttttttttttttttttt

SEQ ID NO: 8936 - DNA, 84 bp, synthetic construct
  source 1..84: mol_type = other DNA
tttttttaagcagtggtatcaacgcagagtacnntcagaaccnngtatggacnntttttttttttttttttttttttttttttt

SEQ ID NO: 8937 - DNA, 84 bp, synthetic construct
  source 1..84: mol_type = other DNA
tttttttaagcagtggtatcaacgcagagtacnntcagaaccnntcgcaacanntttttttttttttttttttttttttttttt

SEQ ID NO: 8938 - DNA, 84 bp, synthetic construct
  source 1..84: mol_type = other DNA
tttttttaagcagtggtatcaacgcagagtacnntcagaaccnnccgctaatnntttttttttttttttttttttttttttttt

SEQ ID NO: 8939 - DNA, 84 bp, synthetic construct
  source 1..84: mol_type = other DNA
tttttttaagcagtggtatcaacgcagagtacnntcagaaccnngattcgcanntttttttttttttttttttttttttttttt

SEQ ID NO: 8940 - DNA, 84 bp, synthetic construct
  source 1..84: mol_type = other DNA
tttttttaagcagtggtatcaacgcagagtacnntcagaaccnncgatggaanntttttttttttttttttttttttttttttt

SEQ ID NO: 8941 - DNA, 84 bp, synthetic construct
  source 1..84: mol_type = other DNA
tttttttaagcagtggtatcaacgcagagtacnntcagaaccnnagcaagganntttttttttttttttttttttttttttttt

SEQ ID NO: 8942 - DNA, 84 bp, synthetic construct
  source 1..84: mol_type = other DNA
tttttttaagcagtggtatcaacgcagagtacnntcagaaccnncgtagcaanntttttttttttttttttttttttttttttt

SEQ ID NO: 8943 - DNA, 84 bp, synthetic construct
  source 1..84: mol_type = other DNA
tttttttaagcagtggtatcaacgcagagtacnntcagaaccnntggcagtanntttttttttttttttttttttttttttttt

SEQ ID NO: 8944 - DNA, 84 bp, synthetic construct
  source 1..84: mol_type = other DNA
tttttttaagcagtggtatcaacgcagagtacnntcagaaccnncggtagttnntttttttttttttttttttttttttttttt

SEQ ID NO: 8945 - DNA, 84 bp, synthetic construct
  source 1..84: mol_type = other DNA
tttttttaagcagtggtatcaacgcagagtacnntcagaaccnntgacttcgnntttttttttttttttttttttttttttttt

SEQ ID NO: 8946 - DNA, 84 bp, synthetic construct
  source 1..84: mol_type = other DNA
tttttttaagcagtggtatcaacgcagagtacnntcagaaccnngagtgcaanntttttttttttttttttttttttttttttt

SEQ ID NO: 8947 - DNA, 84 bp, synthetic construct
  source 1..84: mol_type = other DNA
tttttttaagcagtggtatcaacgcagagtacnntcagaaccnnacggtaacnntttttttttttttttttttttttttttttt

SEQ ID NO: 8948 - DNA, 84 bp, synthetic construct
  source 1..84: mol_type = other DNA
tttttttaagcagtggtatcaacgcagagtacnntcagaaccnnaagtggtgnntttttttttttttttttttttttttttttt

SEQ ID NO: 8949 - DNA, 84 bp, synthetic construct
  source 1..84: mol_type = other DNA
tttttttaagcagtggtatcaacgcagagtacnntcagaaccnnggagacaanntttttttttttttttttttttttttttttt

SEQ ID NO: 8950 - DNA, 84 bp, synthetic construct
  source 1..84: mol_type = other DNA
tttttttaagcagtggtatcaacgcagagtacnntcagaaccnntcaaggacnntttttttttttttttttttttttttttttt

SEQ ID NO: 8951 - DNA, 84 bp, synthetic construct
  source 1..84: mol_type = other DNA
tttttttaagcagtggtatcaacgcagagtacnntcagaaccnnaagagagcnntttttttttttttttttttttttttttttt

SEQ ID NO: 8952 - DNA, 84 bp, synthetic construct
  source 1..84: mol_type = other DNA
tttttttaagcagtggtatcaacgcagagtacnntcagaaccnncgagagatnntttttttttttttttttttttttttttttt

SEQ ID NO: 8953 - DNA, 84 bp, synthetic construct
  source 1..84: mol_type = other DNA
tttttttaagcagtggtatcaacgcagagtacnntcagaaccnnacagatggnntttttttttttttttttttttttttttttt

SEQ ID NO: 8954 - DNA, 84 bp, synthetic construct
  source 1..84: mol_type = other DNA
tttttttaagcagtggtatcaacgcagagtacnntcagaaccnnaggagtcanntttttttttttttttttttttttttttttt

SEQ ID NO: 8955 - DNA, 84 bp, synthetic construct
  source 1..84: mol_type = other DNA
tttttttaagcagtggtatcaacgcagagtacnntcagaaccnncgtgttacnntttttttttttttttttttttttttttttt

SEQ ID NO: 8956 - DNA, 84 bp, synthetic construct
  source 1..84: mol_type = other DNA
tttttttaagcagtggtatcaacgcagagtacnntcagaaccnntagtgtgcnntttttttttttttttttttttttttttttt

SEQ ID NO: 8957 - DNA, 84 bp, synthetic construct
  source 1..84: mol_type = other DNA
tttttttaagcagtggtatcaacgcagagtacnntcagaaccnnctcatgacnntttttttttttttttttttttttttttttt

SEQ ID NO: 8958 - DNA, 84 bp, synthetic construct
  source 1..84: mol_type = other DNA
tttttttaagcagtggtatcaacgcagagtacnntcagaaccnngtatccagnntttttttttttttttttttttttttttttt

SEQ ID NO: 8959 - DNA, 84 bp, synthetic construct
  source 1..84: mol_type = other DNA
tttttttaagcagtggtatcaacgcagagtacnntcagaaccnnacgcctatnntttttttttttttttttttttttttttttt

SEQ ID NO: 8960 - DNA, 84 bp, synthetic construct
  source 1..84: mol_type = other DNA
tttttttaagcagtggtatcaacgcagagtacnntcagaaccnnaacgacctnntttttttttttttttttttttttttttttt

SEQ ID NO: 8961 - DNA, 84 bp, synthetic construct
  source 1..84: mol_type = other DNA
tttttttaagcagtggtatcaacgcagagtacnntcagaaccnnatcaggctnntttttttttttttttttttttttttttttt

SEQ ID NO: 8962 - DNA, 84 bp, synthetic construct
  source 1..84: mol_type = other DNA
tttttttaagcagtggtatcaacgcagagtacnntcagaaccnncaagttcgnntttttttttttttttttttttttttttttt

SEQ ID NO: 8963 - DNA, 84 bp, synthetic construct
  source 1..84: mol_type = other DNA
tttttttaagcagtggtatcaacgcagagtacnntcagaaccnntagccaganntttttttttttttttttttttttttttttt

SEQ ID NO: 8964 - DNA, 84 bp, synthetic construct
  source 1..84: mol_type = other DNA
tttttttaagcagtggtatcaacgcagagtacnntcagaaccnncaatcacgnntttttttttttttttttttttttttttttt

SEQ ID NO: 8965 - DNA, 84 bp, synthetic construct
  source 1..84: mol_type = other DNA
tttttttaagcagtggtatcaacgcagagtacnntcagaaccnngcaacaagnntttttttttttttttttttttttttttttt

SEQ ID NO: 8966 - DNA, 84 bp, synthetic construct
  source 1..84: mol_type = other DNA
tttttttaagcagtggtatcaacgcagagtacnntcagaaccnncacgacaanntttttttttttttttttttttttttttttt

SEQ ID NO: 8967 - DNA, 84 bp, synthetic construct
  source 1..84: mol_type = other DNA
tttttttaagcagtggtatcaacgcagagtacnntcagaaccnntacggaganntttttttttttttttttttttttttttttt

SEQ ID NO: 8968 - DNA, 84 bp, synthetic construct
  source 1..84: mol_type = other DNA
tttttttaagcagtggtatcaacgcagagtacnntcagaaccnncgacaaganntttttttttttttttttttttttttttttt

SEQ ID NO: 8969 - DNA, 84 bp, synthetic construct
  source 1..84: mol_type = other DNA
tttttttaagcagtggtatcaacgcagagtacnntcagaaccnncgaagtganntttttttttttttttttttttttttttttt

SEQ ID NO: 8970 - DNA, 84 bp, synthetic construct
  source 1..84: mol_type = other DNA
tttttttaagcagtggtatcaacgcagagtacnntcagaaccnnagctggtanntttttttttttttttttttttttttttttt

SEQ ID NO: 8971 - DNA, 84 bp, synthetic construct
  source 1..84: mol_type = other DNA
tttttttaagcagtggtatcaacgcagagtacnntcagaaccnnaactaggcnntttttttttttttttttttttttttttttt

SEQ ID NO: 8972 - DNA, 84 bp, synthetic construct
  source 1..84: mol_type = other DNA
tttttttaagcagtggtatcaacgcagagtacnntcagaaccnncagcaagtnntttttttttttttttttttttttttttttt

SEQ ID NO: 8973 - DNA, 84 bp, synthetic construct
  source 1..84: mol_type = other DNA
tttttttaagcagtggtatcaacgcagagtacnntcagaaccnnacgaggtanntttttttttttttttttttttttttttttt

SEQ ID NO: 8974 - DNA, 84 bp, synthetic construct
  source 1..84: mol_type = other DNA
tttttttaagcagtggtatcaacgcagagtacnntcagaaccnncatcttccnntttttttttttttttttttttttttttttt

SEQ ID NO: 8975 - DNA, 84 bp, synthetic construct
  source 1..84: mol_type = other DNA
tttttttaagcagtggtatcaacgcagagtacnntcagaaccnncctgaatcnntttttttttttttttttttttttttttttt

SEQ ID NO: 8976 - DNA, 84 bp, synthetic construct
  source 1..84: mol_type = other DNA
tttttttaagcagtggtatcaacgcagagtacnntcagaaccnntgcagactnntttttttttttttttttttttttttttttt

SEQ ID NO: 8977 - DNA, 84 bp, synthetic construct
  source 1..84: mol_type = other DNA
tttttttaagcagtggtatcaacgcagagtacnntcagaaccnnagatgtggnntttttttttttttttttttttttttttttt

SEQ ID NO: 8978 - DNA, 84 bp, synthetic construct
  source 1..84: mol_type = other DNA
tttttttaagcagtggtatcaacgcagagtacnntcagaaccnnagttcgacnntttttttttttttttttttttttttttttt

SEQ ID NO: 8979 - DNA, 84 bp, synthetic construct
  source 1..84: mol_type = other DNA
tttttttaagcagtggtatcaacgcagagtacnntcagaaccnnacaacctcnntttttttttttttttttttttttttttttt

SEQ ID NO: 8980 - DNA, 84 bp, synthetic construct
  source 1..84: mol_type = other DNA
tttttttaagcagtggtatcaacgcagagtacnntcagaaccnncatggtagnntttttttttttttttttttttttttttttt

SEQ ID NO: 8981 - DNA, 84 bp, synthetic construct
  source 1..84: mol_type = other DNA
tttttttaagcagtggtatcaacgcagagtacnntcagaaccnncgtatctcnntttttttttttttttttttttttttttttt

SEQ ID NO: 8982 - DNA, 84 bp, synthetic construct
  source 1..84: mol_type = other DNA
tttttttaagcagtggtatcaacgcagagtacnntcagaaccnncctagttcnntttttttttttttttttttttttttttttt

SEQ ID NO: 8983 - DNA, 84 bp, synthetic construct
  source 1..84: mol_type = other DNA
tttttttaagcagtggtatcaacgcagagtacnntcagaaccnncaagagtcnntttttttttttttttttttttttttttttt

SEQ ID NO: 8984 - DNA, 84 bp, synthetic construct
  source 1..84: mol_type = other DNA
tttttttaagcagtggtatcaacgcagagtacnntcatgtccnnaatcggcanntttttttttttttttttttttttttttttt

SEQ ID NO: 8985 - DNA, 84 bp, synthetic construct
  source 1..84: mol_type = other DNA
tttttttaagcagtggtatcaacgcagagtacnntcatgtccnntacggcatnntttttttttttttttttttttttttttttt

SEQ ID NO: 8986 - DNA, 84 bp, synthetic construct
  source 1..84: mol_type = other DNA
tttttttaagcagtggtatcaacgcagagtacnntcatgtccnnttggatcgnntttttttttttttttttttttttttttttt

SEQ ID NO: 8987 - DNA, 84 bp, synthetic construct
  source 1..84: mol_type = other DNA
tttttttaagcagtggtatcaacgcagagtacnntcatgtccnntggaacganntttttttttttttttttttttttttttttt

SEQ ID NO: 8988 - DNA, 84 bp, synthetic construct
  source 1..84: mol_type = other DNA
tttttttaagcagtggtatcaacgcagagtacnntcatgtccnnggcaatcanntttttttttttttttttttttttttttttt

SEQ ID NO: 8989 - DNA, 84 bp, synthetic construct
  source 1..84: mol_type = other DNA
tttttttaagcagtggtatcaacgcagagtacnntcatgtccnngaatccganntttttttttttttttttttttttttttttt

SEQ ID NO: 8990 - DNA, 84 bp, synthetic construct
  source 1..84: mol_type = other DNA
tttttttaagcagtggtatcaacgcagagtacnntcatgtccnnttacggtgnntttttttttttttttttttttttttttttt

SEQ ID NO: 8991 - DNA, 84 bp, synthetic construct
  source 1..84: mol_type = other DNA
tttttttaagcagtggtatcaacgcagagtacnntcatgtccnncatatcggnntttttttttttttttttttttttttttttt

SEQ ID NO: 8992 - DNA, 84 bp, synthetic construct
  source 1..84: mol_type = other DNA
tttttttaagcagtggtatcaacgcagagtacnntcatgtccnncttcggtanntttttttttttttttttttttttttttttt

SEQ ID NO: 8993 - DNA, 84 bp, synthetic construct
  source 1..84: mol_type = other DNA
tttttttaagcagtggtatcaacgcagagtacnntcatgtccnntcctaacgnntttttttttttttttttttttttttttttt

SEQ ID NO: 8994 - DNA, 84 bp, synthetic construct
  source 1..84: mol_type = other DNA
tttttttaagcagtggtatcaacgcagagtacnntcatgtccnngtaagccanntttttttttttttttttttttttttttttt

SEQ ID NO: 8995 - DNA, 84 bp, synthetic construct
  source 1..84: mol_type = other DNA
tttttttaagcagtggtatcaacgcagagtacnntcatgtccnntaaggtggnntttttttttttttttttttttttttttttt

SEQ ID NO: 8996 - DNA, 84 bp, synthetic construct
  source 1..84: mol_type = other DNA
tttttttaagcagtggtatcaacgcagagtacnntcatgtccnnggtaagctnntttttttttttttttttttttttttttttt

SEQ ID NO: 8997 - DNA, 84 bp, synthetic construct
  source 1..84: mol_type = other DNA
tttttttaagcagtggtatcaacgcagagtacnntcatgtccnntgtgtcganntttttttttttttttttttttttttttttt

SEQ ID NO: 8998 - DNA, 84 bp, synthetic construct
  source 1..84: mol_type = other DNA
tttttttaagcagtggtatcaacgcagagtacnntcatgtccnngagcatganntttttttttttttttttttttttttttttt

SEQ ID NO: 8999 - DNA, 84 bp, synthetic construct
  source 1..84: mol_type = other DNA
tttttttaagcagtggtatcaacgcagagtacnntcatgtccnntcgaagtcnntttttttttttttttttttttttttttttt

SEQ ID NO: 9000 - DNA, 84 bp, synthetic construct
  source 1..84: mol_type = other DNA
tttttttaagcagtggtatcaacgcagagtacnntcatgtccnnggtgaacanntttttttttttttttttttttttttttttt

SEQ ID NO: 9001 - DNA, 84 bp, synthetic construct
  source 1..84: mol_type = other DNA
tttttttaagcagtggtatcaacgcagagtacnntcatgtccnnacatgcacnntttttttttttttttttttttttttttttt

SEQ ID NO: 9002 - DNA, 84 bp, synthetic construct
  source 1..84: mol_type = other DNA
tttttttaagcagtggtatcaacgcagagtacnntcatgtccnnccaacagtnntttttttttttttttttttttttttttttt

SEQ ID NO: 9003 - DNA, 84 bp, synthetic construct
  source 1..84: mol_type = other DNA
tttttttaagcagtggtatcaacgcagagtacnntcatgtccnnagaacagcnntttttttttttttttttttttttttttttt

SEQ ID NO: 9004 - DNA, 84 bp, synthetic construct
  source 1..84: mol_type = other DNA
tttttttaagcagtggtatcaacgcagagtacnntcatgtccnngaacacgtnntttttttttttttttttttttttttttttt

SEQ ID NO: 9005 - DNA, 84 bp, synthetic construct
  source 1..84: mol_type = other DNA
tttttttaagcagtggtatcaacgcagagtacnntcatgtccnnggtcttcanntttttttttttttttttttttttttttttt

SEQ ID NO: 9006 - DNA, 84 bp, synthetic construct
  source 1..84: mol_type = other DNA
tttttttaagcagtggtatcaacgcagagtacnntcatgtccnnaggttcagnntttttttttttttttttttttttttttttt

SEQ ID NO: 9007 - DNA, 84 bp, synthetic construct
  source 1..84: mol_type = other DNA
tttttttaagcagtggtatcaacgcagagtacnntcatgtccnnctagagcanntttttttttttttttttttttttttttttt

SEQ ID NO: 9008 - DNA, 84 bp, synthetic construct
  source 1..84: mol_type = other DNA
tttttttaagcagtggtatcaacgcagagtacnntcatgtccnncttctagcnntttttttttttttttttttttttttttttt

SEQ ID NO: 9009 - DNA, 84 bp, synthetic construct
  source 1..84: mol_type = other DNA
tttttttaagcagtggtatcaacgcagagtacnntcatgtccnngagtaacgnntttttttttttttttttttttttttttttt

SEQ ID NO: 9010 - DNA, 84 bp, synthetic construct
  source 1..84: mol_type = other DNA
tttttttaagcagtggtatcaacgcagagtacnntcatgtccnnctaagaggnntttttttttttttttttttttttttttttt

SEQ ID NO: 9011 - DNA, 84 bp, synthetic construct
  source 1..84: mol_type = other DNA
tttttttaagcagtggtatcaacgcagagtacnntcatgtccnnacgtgtagnntttttttttttttttttttttttttttttt

SEQ ID NO: 9012 - DNA, 84 bp, synthetic construct
  source 1..84: mol_type = other DNA
tttttttaagcagtggtatcaacgcagagtacnntcatgtccnnactacaggnntttttttttttttttttttttttttttttt

SEQ ID NO: 9013 - DNA, 84 bp, synthetic construct
  source 1..84: mol_type = other DNA
tttttttaagcagtggtatcaacgcagagtacnntcatgtccnntacaggtcnntttttttttttttttttttttttttttttt

SEQ ID NO: 9014 - DNA, 84 bp, synthetic construct
  source 1..84: mol_type = other DNA
tttttttaagcagtggtatcaacgcagagtacnntcatgtccnnctcacatgnntttttttttttttttttttttttttttttt

SEQ ID NO: 9015 - DNA, 84 bp, synthetic construct
  source 1..84: mol_type = other DNA
tttttttaagcagtggtatcaacgcagagtacnntcatgtccnnactaggagnntttttttttttttttttttttttttttttt

SEQ ID NO: 9016 - DNA, 84 bp, synthetic construct
  source 1..84: mol_type = other DNA
tttttttaagcagtggtatcaacgcagagtacnntcatgtccnnccatagganntttttttttttttttttttttttttttttt

SEQ ID NO: 9017 - DNA, 84 bp, synthetic construct
  source 1..84: mol_type = other DNA
tttttttaagcagtggtatcaacgcagagtacnntcatgtccnnggagaatcnntttttttttttttttttttttttttttttt

SEQ ID NO: 9018 - DNA, 84 bp, synthetic construct
  source 1..84: mol_type = other DNA
tttttttaagcagtggtatcaacgcagagtacnntcatgtccnngccaagaanntttttttttttttttttttttttttttttt

SEQ ID NO: 9019 - DNA, 84 bp, synthetic construct
  source 1..84: mol_type = other DNA
tttttttaagcagtggtatcaacgcagagtacnntcatgtccnnaaggcaagnntttttttttttttttttttttttttttttt

SEQ ID NO: 9020 - DNA, 84 bp, synthetic construct
  source 1..84: mol_type = other DNA
tttttttaagcagtggtatcaacgcagagtacnntcatgtccnnaatgtcgcnntttttttttttttttttttttttttttttt

SEQ ID NO: 9021 - DNA, 84 bp, synthetic construct
  source 1..84: mol_type = other DNA
tttttttaagcagtggtatcaacgcagagtacnntcatgtccnnatggaaccnntttttttttttttttttttttttttttttt

SEQ ID NO: 9022 - DNA, 84 bp, synthetic construct
  source 1..84: mol_type = other DNA
tttttttaagcagtggtatcaacgcagagtacnntcatgtccnnagaggcatnntttttttttttttttttttttttttttttt

SEQ ID NO: 9023 - DNA, 84 bp, synthetic construct
  source 1..84: mol_type = other DNA
tttttttaagcagtggtatcaacgcagagtacnntcatgtccnntgcatagcnntttttttttttttttttttttttttttttt

SEQ ID NO: 9024 - DNA, 84 bp, synthetic construct
  source 1..84: mol_type = other DNA
tttttttaagcagtggtatcaacgcagagtacnntcatgtccnnctaacgganntttttttttttttttttttttttttttttt

SEQ ID NO: 9025 - DNA, 84 bp, synthetic construct
  source 1..84: mol_type = other DNA
tttttttaagcagtggtatcaacgcagagtacnntcatgtccnntatcgaggnntttttttttttttttttttttttttttttt

SEQ ID NO: 9026 - DNA, 84 bp, synthetic construct
  source 1..84: mol_type = other DNA
tttttttaagcagtggtatcaacgcagagtacnntcatgtccnncatagcctnntttttttttttttttttttttttttttttt

SEQ ID NO: 9027 - DNA, 84 bp, synthetic construct
  source 1..84: mol_type = other DNA
tttttttaagcagtggtatcaacgcagagtacnntcatgtccnnatcgagacnntttttttttttttttttttttttttttttt

SEQ ID NO: 9028 - DNA, 84 bp, synthetic construct
  source 1..84: mol_type = other DNA
tttttttaagcagtggtatcaacgcagagtacnntcatgtccnnggaagagtnntttttttttttttttttttttttttttttt

SEQ ID NO: 9029 - DNA, 84 bp, synthetic construct
  source 1..84: mol_type = other DNA
tttttttaagcagtggtatcaacgcagagtacnntcatgtccnnccaagtagnntttttttttttttttttttttttttttttt

SEQ ID NO: 9030 - DNA, 84 bp, synthetic construct
  source 1..84: mol_type = other DNA
tttttttaagcagtggtatcaacgcagagtacnntcatgtccnnctgaacagnntttttttttttttttttttttttttttttt

SEQ ID NO: 9031 - DNA, 84 bp, synthetic construct
  source 1..84: mol_type = other DNA
tttttttaagcagtggtatcaacgcagagtacnntcatgtccnngtaggttcnntttttttttttttttttttttttttttttt

SEQ ID NO: 9032 - DNA, 84 bp, synthetic construct
  source 1..84: mol_type = other DNA
tttttttaagcagtggtatcaacgcagagtacnntcatgtccnngtatggacnntttttttttttttttttttttttttttttt

SEQ ID NO: 9033 - DNA, 84 bp, synthetic construct
  source 1..84: mol_type = other DNA
tttttttaagcagtggtatcaacgcagagtacnntcatgtccnntcgcaacanntttttttttttttttttttttttttttttt

SEQ ID NO: 9034 - DNA, 84 bp, synthetic construct
  source 1..84: mol_type = other DNA
tttttttaagcagtggtatcaacgcagagtacnntcatgtccnnccgctaatnntttttttttttttttttttttttttttttt

SEQ ID NO: 9035 - DNA, 84 bp, synthetic construct
  source 1..84: mol_type = other DNA
tttttttaagcagtggtatcaacgcagagtacnntcatgtccnngattcgcanntttttttttttttttttttttttttttttt

SEQ ID NO: 9036 - DNA, 84 bp, synthetic construct
  source 1..84: mol_type = other DNA
tttttttaagcagtggtatcaacgcagagtacnntcatgtccnncgatggaanntttttttttttttttttttttttttttttt

SEQ ID NO: 9037 - DNA, 84 bp, synthetic construct
  source 1..84: mol_type = other DNA
tttttttaagcagtggtatcaacgcagagtacnntcatgtccnnagcaagganntttttttttttttttttttttttttttttt

SEQ ID NO: 9038 - DNA, 84 bp, synthetic construct
  source 1..84: mol_type = other DNA
tttttttaagcagtggtatcaacgcagagtacnntcatgtccnncgtagcaanntttttttttttttttttttttttttttttt

SEQ ID NO: 9039 - DNA, 84 bp, synthetic construct
  source 1..84: mol_type = other DNA
tttttttaagcagtggtatcaacgcagagtacnntcatgtccnntggcagtanntttttttttttttttttttttttttttttt

SEQ ID NO: 9040 - DNA, 84 bp, synthetic construct
  source 1..84: mol_type = other DNA
tttttttaagcagtggtatcaacgcagagtacnntcatgtccnncggtagttnntttttttttttttttttttttttttttttt

SEQ ID NO: 9041 - DNA, 84 bp, synthetic construct
  source 1..84: mol_type = other DNA
tttttttaagcagtggtatcaacgcagagtacnntcatgtccnntgacttcgnntttttttttttttttttttttttttttttt

SEQ ID NO: 9042 - DNA, 84 bp, synthetic construct
  source 1..84: mol_type = other DNA
tttttttaagcagtggtatcaacgcagagtacnntcatgtccnngagtgcaanntttttttttttttttttttttttttttttt

SEQ ID NO: 9043 - DNA, 84 bp, synthetic construct
  source 1..84: mol_type = other DNA
tttttttaagcagtggtatcaacgcagagtacnntcatgtccnnacggtaacnntttttttttttttttttttttttttttttt

SEQ ID NO: 9044 - DNA, 84 bp, synthetic construct
  source 1..84: mol_type = other DNA
tttttttaagcagtggtatcaacgcagagtacnntcatgtccnnaagtggtgnntttttttttttttttttttttttttttttt

SEQ ID NO: 9045 - DNA, 84 bp, synthetic construct
  source 1..84: mol_type = other DNA
tttttttaagcagtggtatcaacgcagagtacnntcatgtccnnggagacaanntttttttttttttttttttttttttttttt

SEQ ID NO: 9046 - DNA, 84 bp, synthetic construct
  source 1..84: mol_type = other DNA
tttttttaagcagtggtatcaacgcagagtacnntcatgtccnntcaaggacnntttttttttttttttttttttttttttttt

SEQ ID NO: 9047 - DNA, 84 bp, synthetic construct
  source 1..84: mol_type = other DNA
tttttttaagcagtggtatcaacgcagagtacnntcatgtccnnaagagagcnntttttttttttttttttttttttttttttt

SEQ ID NO: 9048 - DNA, 84 bp, synthetic construct
  source 1..84: mol_type = other DNA
tttttttaagcagtggtatcaacgcagagtacnntcatgtccnncgagagatnntttttttttttttttttttttttttttttt

SEQ ID NO: 9049 - DNA, 84 bp, synthetic construct
  source 1..84: mol_type = other DNA
tttttttaagcagtggtatcaacgcagagtacnntcatgtccnnacagatggnntttttttttttttttttttttttttttttt

SEQ ID NO: 9050 - DNA, 84 bp, synthetic construct
  source 1..84: mol_type = other DNA
tttttttaagcagtggtatcaacgcagagtacnntcatgtccnnaggagtcanntttttttttttttttttttttttttttttt

SEQ ID NO: 9051 - DNA, 84 bp, synthetic construct
  source 1..84: mol_type = other DNA
tttttttaagcagtggtatcaacgcagagtacnntcatgtccnncgtgttacnntttttttttttttttttttttttttttttt

SEQ ID NO: 9052 - DNA, 84 bp, synthetic construct
  source 1..84: mol_type = other DNA
tttttttaagcagtggtatcaacgcagagtacnntcatgtccnntagtgtgcnntttttttttttttttttttttttttttttt

SEQ ID NO: 9053 - DNA, 84 bp, synthetic construct
  source 1..84: mol_type = other DNA
tttttttaagcagtggtatcaacgcagagtacnntcatgtccnnctcatgacnntttttttttttttttttttttttttttttt

SEQ ID NO: 9054 - DNA, 84 bp, synthetic construct
  source 1..84: mol_type = other DNA
tttttttaagcagtggtatcaacgcagagtacnntcatgtccnngtatccagnntttttttttttttttttttttttttttttt

SEQ ID NO: 9055 - DNA, 84 bp, synthetic construct
  source 1..84: mol_type = other DNA
tttttttaagcagtggtatcaacgcagagtacnntcatgtccnnacgcctatnntttttttttttttttttttttttttttttt

SEQ ID NO: 9056 - DNA, 84 bp, synthetic construct
  source 1..84: mol_type = other DNA
tttttttaagcagtggtatcaacgcagagtacnntcatgtccnnaacgacctnntttttttttttttttttttttttttttttt

SEQ ID NO: 9057 - DNA, 84 bp, synthetic construct
  source 1..84: mol_type = other DNA
tttttttaagcagtggtatcaacgcagagtacnntcatgtccnnatcaggctnntttttttttttttttttttttttttttttt

SEQ ID NO: 9058 - DNA, 84 bp, synthetic construct
  source 1..84: mol_type = other DNA
tttttttaagcagtggtatcaacgcagagtacnntcatgtccnncaagttcgnntttttttttttttttttttttttttttttt

SEQ ID NO: 9059 - DNA, 84 bp, synthetic construct
  source 1..84: mol_type = other DNA
tttttttaagcagtggtatcaacgcagagtacnntcatgtccnntagccaganntttttttttttttttttttttttttttttt

SEQ ID NO: 9060 - DNA, 84 bp, synthetic construct
  source 1..84: mol_type = other DNA
tttttttaagcagtggtatcaacgcagagtacnntcatgtccnncaatcacgnntttttttttttttttttttttttttttttt

SEQ ID NO: 9061 - DNA, 84 bp, synthetic construct
  source 1..84: mol_type = other DNA
tttttttaagcagtggtatcaacgcagagtacnntcatgtccnngcaacaagnntttttttttttttttttttttttttttttt

SEQ ID NO: 9062 - DNA, 84 bp, synthetic construct
  source 1..84: mol_type = other DNA
tttttttaagcagtggtatcaacgcagagtacnntcatgtccnncacgacaanntttttttttttttttttttttttttttttt

SEQ ID NO: 9063 - DNA, 84 bp, synthetic construct
  source 1..84: mol_type = other DNA
tttttttaagcagtggtatcaacgcagagtacnntcatgtccnntacggaganntttttttttttttttttttttttttttttt

SEQ ID NO: 9064 - DNA, 84 bp, synthetic construct
  source 1..84: mol_type = other DNA
tttttttaagcagtggtatcaacgcagagtacnntcatgtccnncgacaaganntttttttttttttttttttttttttttttt

SEQ ID NO: 9065 - DNA, 84 bp, synthetic construct
  source 1..84: mol_type = other DNA
tttttttaagcagtggtatcaacgcagagtacnntcatgtccnncgaagtganntttttttttttttttttttttttttttttt

SEQ ID NO: 9066 - DNA, 84 bp, synthetic construct
  source 1..84: mol_type = other DNA
tttttttaagcagtggtatcaacgcagagtacnntcatgtccnnagctggtanntttttttttttttttttttttttttttttt

SEQ ID NO: 9067 - DNA, 84 bp, synthetic construct
  source 1..84: mol_type = other DNA
tttttttaagcagtggtatcaacgcagagtacnntcatgtccnnaactaggcnntttttttttttttttttttttttttttttt

SEQ ID NO: 9068 - DNA, 84 bp, synthetic construct
  source 1..84: mol_type = other DNA
tttttttaagcagtggtatcaacgcagagtacnntcatgtccnncagcaagtnntttttttttttttttttttttttttttttt

SEQ ID NO: 9069 - DNA, 84 bp, synthetic construct
  source 1..84: mol_type = other DNA
tttttttaagcagtggtatcaacgcagagtacnntcatgtccnnacgaggtanntttttttttttttttttttttttttttttt

SEQ ID NO: 9070 - DNA, 84 bp, synthetic construct
  source 1..84: mol_type = other DNA
tttttttaagcagtggtatcaacgcagagtacnntcatgtccnncatcttccnntttttttttttttttttttttttttttttt

SEQ ID NO: 9071 - DNA, 84 bp, synthetic construct
  source 1..84: mol_type = other DNA
tttttttaagcagtggtatcaacgcagagtacnntcatgtccnncctgaatcnntttttttttttttttttttttttttttttt

SEQ ID NO: 9072 - DNA, 84 bp, synthetic construct
  source 1..84: mol_type = other DNA
tttttttaagcagtggtatcaacgcagagtacnntcatgtccnntgcagactnntttttttttttttttttttttttttttttt

SEQ ID NO: 9073 - DNA, 84 bp, synthetic construct
  source 1..84: mol_type = other DNA
tttttttaagcagtggtatcaacgcagagtacnntcatgtccnnagatgtggnntttttttttttttttttttttttttttttt

SEQ ID NO: 9074 - DNA, 84 bp, synthetic construct
  source 1..84: mol_type = other DNA
tttttttaagcagtggtatcaacgcagagtacnntcatgtccnnagttcgacnntttttttttttttttttttttttttttttt

SEQ ID NO: 9075 - DNA, 84 bp, synthetic construct
  source 1..84: mol_type = other DNA
tttttttaagcagtggtatcaacgcagagtacnntcatgtccnnacaacctcnntttttttttttttttttttttttttttttt

SEQ ID NO: 9076 - DNA, 84 bp, synthetic construct
  source 1..84: mol_type = other DNA
tttttttaagcagtggtatcaacgcagagtacnntcatgtccnncatggtagnntttttttttttttttttttttttttttttt

SEQ ID NO: 9077 - DNA, 84 bp, synthetic construct
  source 1..84: mol_type = other DNA
tttttttaagcagtggtatcaacgcagagtacnntcatgtccnncgtatctcnntttttttttttttttttttttttttttttt

SEQ ID NO: 9078 - DNA, 84 bp, synthetic construct
  source 1..84: mol_type = other DNA
tttttttaagcagtggtatcaacgcagagtacnntcatgtccnncctagttcnntttttttttttttttttttttttttttttt

SEQ ID NO: 9079 - DNA, 84 bp, synthetic construct
  source 1..84: mol_type = other DNA
tttttttaagcagtggtatcaacgcagagtacnntcatgtccnncaagagtcnntttttttttttttttttttttttttttttt

SEQ ID NO: 9080 - DNA, 84 bp, synthetic construct
  source 1..84: mol_type = other DNA
tttttttaagcagtggtatcaacgcagagtacnnacaagaccnnaatcggcanntttttttttttttttttttttttttttttt

SEQ ID NO: 9081 - DNA, 84 bp, synthetic construct
  source 1..84: mol_type = other DNA
tttttttaagcagtggtatcaacgcagagtacnnacaagaccnntacggcatnntttttttttttttttttttttttttttttt

SEQ ID NO: 9082 - DNA, 84 bp, synthetic construct
  source 1..84: mol_type = other DNA
tttttttaagcagtggtatcaacgcagagtacnnacaagaccnnttggatcgnntttttttttttttttttttttttttttttt

SEQ ID NO: 9083 - DNA, 84 bp, synthetic construct
  source 1..84: mol_type = other DNA
tttttttaagcagtggtatcaacgcagagtacnnacaagaccnntggaacganntttttttttttttttttttttttttttttt

SEQ ID NO: 9084 - DNA, 84 bp, synthetic construct
  source 1..84: mol_type = other DNA
tttttttaagcagtggtatcaacgcagagtacnnacaagaccnnggcaatcanntttttttttttttttttttttttttttttt

SEQ ID NO: 9085 - DNA, 84 bp, synthetic construct
  source 1..84: mol_type = other DNA
tttttttaagcagtggtatcaacgcagagtacnnacaagaccnngaatccganntttttttttttttttttttttttttttttt

SEQ ID NO: 9086 - DNA, 84 bp, synthetic construct
  source 1..84: mol_type = other DNA
tttttttaagcagtggtatcaacgcagagtacnnacaagaccnnttacggtgnntttttttttttttttttttttttttttttt

SEQ ID NO: 9087 - DNA, 84 bp, synthetic construct
  source 1..84: mol_type = other DNA
tttttttaagcagtggtatcaacgcagagtacnnacaagaccnncatatcggnntttttttttttttttttttttttttttttt

SEQ ID NO: 9088 - DNA, 84 bp, synthetic construct
  source 1..84: mol_type = other DNA
tttttttaagcagtggtatcaacgcagagtacnnacaagaccnncttcggtanntttttttttttttttttttttttttttttt

SEQ ID NO: 9089 - DNA, 84 bp, synthetic construct
  source 1..84: mol_type = other DNA
tttttttaagcagtggtatcaacgcagagtacnnacaagaccnntcctaacgnntttttttttttttttttttttttttttttt

SEQ ID NO: 9090 - DNA, 84 bp, synthetic construct
  source 1..84: mol_type = other DNA
tttttttaagcagtggtatcaacgcagagtacnnacaagaccnngtaagccanntttttttttttttttttttttttttttttt

SEQ ID NO: 9091 - DNA, 84 bp, synthetic construct
  source 1..84: mol_type = other DNA
tttttttaagcagtggtatcaacgcagagtacnnacaagaccnntaaggtggnntttttttttttttttttttttttttttttt

SEQ ID NO: 9092 - DNA, 84 bp, synthetic construct
  source 1..84: mol_type = other DNA
tttttttaagcagtggtatcaacgcagagtacnnacaagaccnnggtaagctnntttttttttttttttttttttttttttttt

SEQ ID NO: 9093 - DNA, 84 bp, synthetic construct
  source 1..84: mol_type = other DNA
tttttttaagcagtggtatcaacgcagagtacnnacaagaccnntgtgtcganntttttttttttttttttttttttttttttt

SEQ ID NO: 9094 - DNA, 84 bp, synthetic construct
  source 1..84: mol_type = other DNA
tttttttaagcagtggtatcaacgcagagtacnnacaagaccnngagcatganntttttttttttttttttttttttttttttt

SEQ ID NO: 9095 - DNA, 84 bp, synthetic construct
  source 1..84: mol_type = other DNA
tttttttaagcagtggtatcaacgcagagtacnnacaagaccnntcgaagtcnntttttttttttttttttttttttttttttt

SEQ ID NO: 9096 - DNA, 84 bp, synthetic construct
  source 1..84: mol_type = other DNA
tttttttaagcagtggtatcaacgcagagtacnnacaagaccnnggtgaacanntttttttttttttttttttttttttttttt

SEQ ID NO: 9097 - DNA, 84 bp, synthetic construct
  source 1..84: mol_type = other DNA
tttttttaagcagtggtatcaacgcagagtacnnacaagaccnnacatgcacnntttttttttttttttttttttttttttttt

SEQ ID NO: 9098 - DNA, 84 bp, synthetic construct
  source 1..84: mol_type = other DNA
tttttttaagcagtggtatcaacgcagagtacnnacaagaccnnccaacagtnntttttttttttttttttttttttttttttt

SEQ ID NO: 9099 - DNA, 84 bp, synthetic construct
  source 1..84: mol_type = other DNA
tttttttaagcagtggtatcaacgcagagtacnnacaagaccnnagaacagcnntttttttttttttttttttttttttttttt

SEQ ID NO: 9100 - DNA, 84 bp, synthetic construct
  source 1..84: mol_type = other DNA
tttttttaagcagtggtatcaacgcagagtacnnacaagaccnngaacacgtnntttttttttttttttttttttttttttttt

SEQ ID NO: 9101 - DNA, 84 bp, synthetic construct
  source 1..84: mol_type = other DNA
tttttttaagcagtggtatcaacgcagagtacnnacaagaccnnggtcttcanntttttttttttttttttttttttttttttt

SEQ ID NO: 9102 - DNA, 84 bp, synthetic construct
  source 1..84: mol_type = other DNA
tttttttaagcagtggtatcaacgcagagtacnnacaagaccnnaggttcagnntttttttttttttttttttttttttttttt

SEQ ID NO: 9103 - DNA, 84 bp, synthetic construct
  source 1..84: mol_type = other DNA
tttttttaagcagtggtatcaacgcagagtacnnacaagaccnnctagagcanntttttttttttttttttttttttttttttt

SEQ ID NO: 9104 - DNA, 84 bp, synthetic construct
  source 1..84: mol_type = other DNA
tttttttaagcagtggtatcaacgcagagtacnnacaagaccnncttctagcnntttttttttttttttttttttttttttttt

SEQ ID NO: 9105 - DNA, 84 bp, synthetic construct
  source 1..84: mol_type = other DNA
tttttttaagcagtggtatcaacgcagagtacnnacaagaccnngagtaacgnntttttttttttttttttttttttttttttt

SEQ ID NO: 9106 - DNA, 84 bp, synthetic construct
  source 1..84: mol_type = other DNA
tttttttaagcagtggtatcaacgcagagtacnnacaagaccnnctaagaggnntttttttttttttttttttttttttttttt

SEQ ID NO: 9107 - DNA, 84 bp, synthetic construct
  source 1..84: mol_type = other DNA
tttttttaagcagtggtatcaacgcagagtacnnacaagaccnnacgtgtagnntttttttttttttttttttttttttttttt

SEQ ID NO: 9108 - DNA, 84 bp, synthetic construct
  source 1..84: mol_type = other DNA
tttttttaagcagtggtatcaacgcagagtacnnacaagaccnnactacaggnntttttttttttttttttttttttttttttt

SEQ ID NO: 9109 - DNA, 84 bp, synthetic construct
  source 1..84: mol_type = other DNA
tttttttaagcagtggtatcaacgcagagtacnnacaagaccnntacaggtcnntttttttttttttttttttttttttttttt

SEQ ID NO: 9110 - DNA, 84 bp, synthetic construct
  source 1..84: mol_type = other DNA
tttttttaagcagtggtatcaacgcagagtacnnacaagaccnnctcacatgnntttttttttttttttttttttttttttttt

SEQ ID NO: 9111 - DNA, 84 bp, synthetic construct
  source 1..84: mol_type = other DNA
tttttttaagcagtggtatcaacgcagagtacnnacaagaccnnactaggagnntttttttttttttttttttttttttttttt

SEQ ID NO: 9112 - DNA, 84 bp, synthetic construct
  source 1..84: mol_type = other DNA
tttttttaagcagtggtatcaacgcagagtacnnacaagaccnnccatagganntttttttttttttttttttttttttttttt

SEQ ID NO: 9113 - DNA, 84 bp, synthetic construct
  source 1..84: mol_type = other DNA
tttttttaagcagtggtatcaacgcagagtacnnacaagaccnnggagaatcnntttttttttttttttttttttttttttttt

SEQ ID NO: 9114 - DNA, 84 bp, synthetic construct
  source 1..84: mol_type = other DNA
tttttttaagcagtggtatcaacgcagagtacnnacaagaccnngccaagaanntttttttttttttttttttttttttttttt

SEQ ID NO: 9115 - DNA, 84 bp, synthetic construct
  source 1..84: mol_type = other DNA
tttttttaagcagtggtatcaacgcagagtacnnacaagaccnnaaggcaagnntttttttttttttttttttttttttttttt

SEQ ID NO: 9116 - DNA, 84 bp, synthetic construct
  source 1..84: mol_type = other DNA
tttttttaagcagtggtatcaacgcagagtacnnacaagaccnnaatgtcgcnntttttttttttttttttttttttttttttt

SEQ ID NO: 9117 - DNA, 84 bp, synthetic construct
  source 1..84: mol_type = other DNA
tttttttaagcagtggtatcaacgcagagtacnnacaagaccnnatggaaccnntttttttttttttttttttttttttttttt

SEQ ID NO: 9118 - DNA, 84 bp, synthetic construct
  source 1..84: mol_type = other DNA
tttttttaagcagtggtatcaacgcagagtacnnacaagaccnnagaggcatnntttttttttttttttttttttttttttttt

SEQ ID NO: 9119 - DNA, 84 bp, synthetic construct
  source 1..84: mol_type = other DNA
tttttttaagcagtggtatcaacgcagagtacnnacaagaccnntgcatagcnntttttttttttttttttttttttttttttt

SEQ ID NO: 9120 - DNA, 84 bp, synthetic construct
  source 1..84: mol_type = other DNA
tttttttaagcagtggtatcaacgcagagtacnnacaagaccnnctaacgganntttttttttttttttttttttttttttttt

SEQ ID NO: 9121 - DNA, 84 bp, synthetic construct
  source 1..84: mol_type = other DNA
tttttttaagcagtggtatcaacgcagagtacnnacaagaccnntatcgaggnntttttttttttttttttttttttttttttt

SEQ ID NO: 9122 - DNA, 84 bp, synthetic construct
  source 1..84: mol_type = other DNA
tttttttaagcagtggtatcaacgcagagtacnnacaagaccnncatagcctnntttttttttttttttttttttttttttttt

SEQ ID NO: 9123 - DNA, 84 bp, synthetic construct
  source 1..84: mol_type = other DNA
tttttttaagcagtggtatcaacgcagagtacnnacaagaccnnatcgagacnntttttttttttttttttttttttttttttt

SEQ ID NO: 9124 - DNA, 84 bp, synthetic construct
  source 1..84: mol_type = other DNA
tttttttaagcagtggtatcaacgcagagtacnnacaagaccnnggaagagtnntttttttttttttttttttttttttttttt

SEQ ID NO: 9125 - DNA, 84 bp, synthetic construct
  source 1..84: mol_type = other DNA
tttttttaagcagtggtatcaacgcagagtacnnacaagaccnnccaagtagnntttttttttttttttttttttttttttttt

SEQ ID NO: 9126 - DNA, 84 bp, synthetic construct
  source 1..84: mol_type = other DNA
tttttttaagcagtggtatcaacgcagagtacnnacaagaccnnctgaacagnntttttttttttttttttttttttttttttt

SEQ ID NO: 9127 - DNA, 84 bp, synthetic construct
  source 1..84: mol_type = other DNA
tttttttaagcagtggtatcaacgcagagtacnnacaagaccnngtaggttcnntttttttttttttttttttttttttttttt

SEQ ID NO: 9128 - DNA, 84 bp, synthetic construct
  source 1..84: mol_type = other DNA
tttttttaagcagtggtatcaacgcagagtacnnacaagaccnngtatggacnntttttttttttttttttttttttttttttt

SEQ ID NO: 9129 - DNA, 84 bp, synthetic construct
  source 1..84: mol_type = other DNA
tttttttaagcagtggtatcaacgcagagtacnnacaagaccnntcgcaacanntttttttttttttttttttttttttttttt

SEQ ID NO: 9130 - DNA, 84 bp, synthetic construct
  source 1..84: mol_type = other DNA
tttttttaagcagtggtatcaacgcagagtacnnacaagaccnnccgctaatnntttttttttttttttttttttttttttttt

SEQ ID NO: 9131 - DNA, 84 bp, synthetic construct
  source 1..84: mol_type = other DNA
tttttttaagcagtggtatcaacgcagagtacnnacaagaccnngattcgcanntttttttttttttttttttttttttttttt

SEQ ID NO: 9132 - DNA, 84 bp, synthetic construct
  source 1..84: mol_type = other DNA
tttttttaagcagtggtatcaacgcagagtacnnacaagaccnncgatggaanntttttttttttttttttttttttttttttt

SEQ ID NO: 9133 - DNA, 84 bp, synthetic construct
  source 1..84: mol_type = other DNA
tttttttaagcagtggtatcaacgcagagtacnnacaagaccnnagcaagganntttttttttttttttttttttttttttttt

SEQ ID NO: 9134 - DNA, 84 bp, synthetic construct
  source 1..84: mol_type = other DNA
tttttttaagcagtggtatcaacgcagagtacnnacaagaccnncgtagcaanntttttttttttttttttttttttttttttt

SEQ ID NO: 9135 - DNA, 84 bp, synthetic construct
  source 1..84: mol_type = other DNA
tttttttaagcagtggtatcaacgcagagtacnnacaagaccnntggcagtanntttttttttttttttttttttttttttttt

SEQ ID NO: 9136 - DNA, 84 bp, synthetic construct
  source 1..84: mol_type = other DNA
tttttttaagcagtggtatcaacgcagagtacnnacaagaccnncggtagttnntttttttttttttttttttttttttttttt

SEQ ID NO: 9137 - DNA, 84 bp, synthetic construct
  source 1..84: mol_type = other DNA
tttttttaagcagtggtatcaacgcagagtacnnacaagaccnntgacttcgnntttttttttttttttttttttttttttttt

SEQ ID NO: 9138 - DNA, 84 bp, synthetic construct
  source 1..84: mol_type = other DNA
tttttttaagcagtggtatcaacgcagagtacnnacaagaccnngagtgcaanntttttttttttttttttttttttttttttt

SEQ ID NO: 9139 - DNA, 84 bp, synthetic construct
  source 1..84: mol_type = other DNA
tttttttaagcagtggtatcaacgcagagtacnnacaagaccnnacggtaacnntttttttttttttttttttttttttttttt

SEQ ID NO: 9140 - DNA, 84 bp, synthetic construct
  source 1..84: mol_type = other DNA
tttttttaagcagtggtatcaacgcagagtacnnacaagaccnnaagtggtgnntttttttttttttttttttttttttttttt

SEQ ID NO: 9141 - DNA, 84 bp, synthetic construct
  source 1..84: mol_type = other DNA
tttttttaagcagtggtatcaacgcagagtacnnacaagaccnnggagacaanntttttttttttttttttttttttttttttt

SEQ ID NO: 9142 - DNA, 84 bp, synthetic construct
  source 1..84: mol_type = other DNA
tttttttaagcagtggtatcaacgcagagtacnnacaagaccnntcaaggacnntttttttttttttttttttttttttttttt

SEQ ID NO: 9143 - DNA, 84 bp, synthetic construct
  source 1..84: mol_type = other DNA
tttttttaagcagtggtatcaacgcagagtacnnacaagaccnnaagagagcnntttttttttttttttttttttttttttttt

SEQ ID NO: 9144 - DNA, 84 bp, synthetic construct
  source 1..84: mol_type = other DNA
tttttttaagcagtggtatcaacgcagagtacnnacaagaccnncgagagatnntttttttttttttttttttttttttttttt

SEQ ID NO: 9145 - DNA, 84 bp, synthetic construct
  source 1..84: mol_type = other DNA
tttttttaagcagtggtatcaacgcagagtacnnacaagaccnnacagatggnntttttttttttttttttttttttttttttt

SEQ ID NO: 9146 - DNA, 84 bp, synthetic construct
  source 1..84: mol_type = other DNA
tttttttaagcagtggtatcaacgcagagtacnnacaagaccnnaggagtcanntttttttttttttttttttttttttttttt

SEQ ID NO: 9147 - DNA, 84 bp, synthetic construct
  source 1..84: mol_type = other DNA
tttttttaagcagtggtatcaacgcagagtacnnacaagaccnncgtgttacnntttttttttttttttttttttttttttttt

SEQ ID NO: 9148 - DNA, 84 bp, synthetic construct
  source 1..84: mol_type = other DNA
tttttttaagcagtggtatcaacgcagagtacnnacaagaccnntagtgtgcnntttttttttttttttttttttttttttttt

SEQ ID NO: 9149 - DNA, 84 bp, synthetic construct
  source 1..84: mol_type = other DNA
tttttttaagcagtggtatcaacgcagagtacnnacaagaccnnctcatgacnntttttttttttttttttttttttttttttt

SEQ ID NO: 9150 - DNA, 84 bp, synthetic construct
  source 1..84: mol_type = other DNA
tttttttaagcagtggtatcaacgcagagtacnnacaagaccnngtatccagnntttttttttttttttttttttttttttttt

SEQ ID NO: 9151 - DNA, 84 bp, synthetic construct
  source 1..84: mol_type = other DNA
tttttttaagcagtggtatcaacgcagagtacnnacaagaccnnacgcctatnntttttttttttttttttttttttttttttt

SEQ ID NO: 9152 - DNA, 84 bp, synthetic construct
  source 1..84: mol_type = other DNA
tttttttaagcagtggtatcaacgcagagtacnnacaagaccnnaacgacctnntttttttttttttttttttttttttttttt

SEQ ID NO: 9153 - DNA, 84 bp, synthetic construct
  source 1..84: mol_type = other DNA
tttttttaagcagtggtatcaacgcagagtacnnacaagaccnnatcaggctnntttttttttttttttttttttttttttttt

SEQ ID NO: 9154 - DNA, 84 bp, synthetic construct
  source 1..84: mol_type = other DNA
tttttttaagcagtggtatcaacgcagagtacnnacaagaccnncaagttcgnntttttttttttttttttttttttttttttt

SEQ ID NO: 9155 - DNA, 84 bp, synthetic construct
  source 1..84: mol_type = other DNA
tttttttaagcagtggtatcaacgcagagtacnnacaagaccnntagccaganntttttttttttttttttttttttttttttt

SEQ ID NO: 9156 - DNA, 84 bp, synthetic construct
  source 1..84: mol_type = other DNA
tttttttaagcagtggtatcaacgcagagtacnnacaagaccnncaatcacgnntttttttttttttttttttttttttttttt

SEQ ID NO: 9157 - DNA, 84 bp, synthetic construct
  source 1..84: mol_type = other DNA
tttttttaagcagtggtatcaacgcagagtacnnacaagaccnngcaacaagnntttttttttttttttttttttttttttttt

SEQ ID NO: 9158 - DNA, 84 bp, synthetic construct
  source 1..84: mol_type = other DNA
tttttttaagcagtggtatcaacgcagagtacnnacaagaccnncacgacaanntttttttttttttttttttttttttttttt

SEQ ID NO: 9159 - DNA, 84 bp, synthetic construct
  source 1..84: mol_type = other DNA
tttttttaagcagtggtatcaacgcagagtacnnacaagaccnntacggaganntttttttttttttttttttttttttttttt

SEQ ID NO: 9160 - DNA, 84 bp, synthetic construct
  source 1..84: mol_type = other DNA
tttttttaagcagtggtatcaacgcagagtacnnacaagaccnncgacaaganntttttttttttttttttttttttttttttt

SEQ ID NO: 9161 - DNA, 84 bp, synthetic construct
  source 1..84: mol_type = other DNA
tttttttaagcagtggtatcaacgcagagtacnnacaagaccnncgaagtganntttttttttttttttttttttttttttttt

SEQ ID NO: 9162 - DNA, 84 bp, synthetic construct
  source 1..84: mol_type = other DNA
tttttttaagcagtggtatcaacgcagagtacnnacaagaccnnagctggtanntttttttttttttttttttttttttttttt

SEQ ID NO: 9163 - DNA, 84 bp, synthetic construct
  source 1..84: mol_type = other DNA
tttttttaagcagtggtatcaacgcagagtacnnacaagaccnnaactaggcnntttttttttttttttttttttttttttttt

SEQ ID NO: 9164 - DNA, 84 bp, synthetic construct
  source 1..84: mol_type = other DNA
tttttttaagcagtggtatcaacgcagagtacnnacaagaccnncagcaagtnntttttttttttttttttttttttttttttt

SEQ ID NO: 9165 - DNA, 84 bp, synthetic construct
  source 1..84: mol_type = other DNA
tttttttaagcagtggtatcaacgcagagtacnnacaagaccnnacgaggtanntttttttttttttttttttttttttttttt

SEQ ID NO: 9166 - DNA, 84 bp, synthetic construct
  source 1..84: mol_type = other DNA
tttttttaagcagtggtatcaacgcagagtacnnacaagaccnncatcttccnntttttttttttttttttttttttttttttt

SEQ ID NO: 9167 - DNA, 84 bp, synthetic construct
  source 1..84: mol_type = other DNA
tttttttaagcagtggtatcaacgcagagtacnnacaagaccnncctgaatcnntttttttttttttttttttttttttttttt

SEQ ID NO: 9168 - DNA, 84 bp, synthetic construct
  source 1..84: mol_type = other DNA
tttttttaagcagtggtatcaacgcagagtacnnacaagaccnntgcagactnntttttttttttttttttttttttttttttt

SEQ ID NO: 9169 - DNA, 84 bp, synthetic construct
  source 1..84: mol_type = other DNA
tttttttaagcagtggtatcaacgcagagtacnnacaagaccnnagatgtggnntttttttttttttttttttttttttttttt

SEQ ID NO: 9170 - DNA, 84 bp, synthetic construct
  source 1..84: mol_type = other DNA
tttttttaagcagtggtatcaacgcagagtacnnacaagaccnnagttcgacnntttttttttttttttttttttttttttttt

SEQ ID NO: 9171 - DNA, 84 bp, synthetic construct
  source 1..84: mol_type = other DNA
tttttttaagcagtggtatcaacgcagagtacnnacaagaccnnacaacctcnntttttttttttttttttttttttttttttt

SEQ ID NO: 9172 - DNA, 84 bp, synthetic construct
  source 1..84: mol_type = other DNA
tttttttaagcagtggtatcaacgcagagtacnnacaagaccnncatggtagnntttttttttttttttttttttttttttttt

SEQ ID NO: 9173 - DNA, 84 bp, synthetic construct
  source 1..84: mol_type = other DNA
tttttttaagcagtggtatcaacgcagagtacnnacaagaccnncgtatctcnntttttttttttttttttttttttttttttt

SEQ ID NO: 9174 - DNA, 84 bp, synthetic construct
  source 1..84: mol_type = other DNA
tttttttaagcagtggtatcaacgcagagtacnnacaagaccnncctagttcnntttttttttttttttttttttttttttttt

SEQ ID NO: 9175 - DNA, 84 bp, synthetic construct
  source 1..84: mol_type = other DNA
tttttttaagcagtggtatcaacgcagagtacnnacaagaccnncaagagtcnntttttttttttttttttttttttttttttt

SEQ ID NO: 9176 - DNA, 84 bp, synthetic construct
  source 1..84: mol_type = other DNA
tttttttaagcagtggtatcaacgcagagtacnngttagacgnnaatcggcanntttttttttttttttttttttttttttttt

SEQ ID NO: 9177 - DNA, 84 bp, synthetic construct
  source 1..84: mol_type = other DNA
tttttttaagcagtggtatcaacgcagagtacnngttagacgnntacggcatnntttttttttttttttttttttttttttttt

SEQ ID NO: 9178 - DNA, 84 bp, synthetic construct
  source 1..84: mol_type = other DNA
tttttttaagcagtggtatcaacgcagagtacnngttagacgnnttggatcgnntttttttttttttttttttttttttttttt

SEQ ID NO: 9179 - DNA, 84 bp, synthetic construct
  source 1..84: mol_type = other DNA
tttttttaagcagtggtatcaacgcagagtacnngttagacgnntggaacganntttttttttttttttttttttttttttttt

SEQ ID NO: 9180 - DNA, 84 bp, synthetic construct
  source 1..84: mol_type = other DNA
tttttttaagcagtggtatcaacgcagagtacnngttagacgnnggcaatcanntttttttttttttttttttttttttttttt

SEQ ID NO: 9181 - DNA, 84 bp, synthetic construct
  source 1..84: mol_type = other DNA
tttttttaagcagtggtatcaacgcagagtacnngttagacgnngaatccganntttttttttttttttttttttttttttttt

SEQ ID NO: 9182 - DNA, 84 bp, synthetic construct
  source 1..84: mol_type = other DNA
tttttttaagcagtggtatcaacgcagagtacnngttagacgnnttacggtgnntttttttttttttttttttttttttttttt

SEQ ID NO: 9183 - DNA, 84 bp, synthetic construct
  source 1..84: mol_type = other DNA
tttttttaagcagtggtatcaacgcagagtacnngttagacgnncatatcggnntttttttttttttttttttttttttttttt

SEQ ID NO: 9184 - DNA, 84 bp, synthetic construct
  source 1..84: mol_type = other DNA
tttttttaagcagtggtatcaacgcagagtacnngttagacgnncttcggtanntttttttttttttttttttttttttttttt

SEQ ID NO: 9185 - DNA, 84 bp, synthetic construct
  source 1..84: mol_type = other DNA
tttttttaagcagtggtatcaacgcagagtacnngttagacgnntcctaacgnntttttttttttttttttttttttttttttt

SEQ ID NO: 9186 - DNA, 84 bp, synthetic construct
  source 1..84: mol_type = other DNA
tttttttaagcagtggtatcaacgcagagtacnngttagacgnngtaagccanntttttttttttttttttttttttttttttt

SEQ ID NO: 9187 - DNA, 84 bp, synthetic construct
  source 1..84: mol_type = other DNA
tttttttaagcagtggtatcaacgcagagtacnngttagacgnntaaggtggnntttttttttttttttttttttttttttttt

SEQ ID NO: 9188 - DNA, 84 bp, synthetic construct
  source 1..84: mol_type = other DNA
tttttttaagcagtggtatcaacgcagagtacnngttagacgnnggtaagctnntttttttttttttttttttttttttttttt

SEQ ID NO: 9189 - DNA, 84 bp, synthetic construct
  source 1..84: mol_type = other DNA
tttttttaagcagtggtatcaacgcagagtacnngttagacgnntgtgtcganntttttttttttttttttttttttttttttt

SEQ ID NO: 9190 - DNA, 84 bp, synthetic construct
  source 1..84: mol_type = other DNA
tttttttaagcagtggtatcaacgcagagtacnngttagacgnngagcatganntttttttttttttttttttttttttttttt

SEQ ID NO: 9191 - DNA, 84 bp, synthetic construct
  source 1..84: mol_type = other DNA
tttttttaagcagtggtatcaacgcagagtacnngttagacgnntcgaagtcnntttttttttttttttttttttttttttttt

SEQ ID NO: 9192 - DNA, 84 bp, synthetic construct
  source 1..84: mol_type = other DNA
tttttttaagcagtggtatcaacgcagagtacnngttagacgnnggtgaacanntttttttttttttttttttttttttttttt

SEQ ID NO: 9193 - DNA, 84 bp, synthetic construct
  source 1..84: mol_type = other DNA
tttttttaagcagtggtatcaacgcagagtacnngttagacgnnacatgcacnntttttttttttttttttttttttttttttt

SEQ ID NO: 9194 - DNA, 84 bp, synthetic construct
  source 1..84: mol_type = other DNA
tttttttaagcagtggtatcaacgcagagtacnngttagacgnnccaacagtnntttttttttttttttttttttttttttttt

SEQ ID NO: 9195 - DNA, 84 bp, synthetic construct
  source 1..84: mol_type = other DNA
tttttttaagcagtggtatcaacgcagagtacnngttagacgnnagaacagcnntttttttttttttttttttttttttttttt

SEQ ID NO: 9196 - DNA, 84 bp, synthetic construct
  source 1..84: mol_type = other DNA
tttttttaagcagtggtatcaacgcagagtacnngttagacgnngaacacgtnntttttttttttttttttttttttttttttt

SEQ ID NO: 9197 - DNA, 84 bp, synthetic construct
  source 1..84: mol_type = other DNA
tttttttaagcagtggtatcaacgcagagtacnngttagacgnnggtcttcanntttttttttttttttttttttttttttttt

SEQ ID NO: 9198 - DNA, 84 bp, synthetic construct
  source 1..84: mol_type = other DNA
tttttttaagcagtggtatcaacgcagagtacnngttagacgnnaggttcagnntttttttttttttttttttttttttttttt

SEQ ID NO: 9199 - DNA, 84 bp, synthetic construct
  source 1..84: mol_type = other DNA
tttttttaagcagtggtatcaacgcagagtacnngttagacgnnctagagcanntttttttttttttttttttttttttttttt

SEQ ID NO: 9200 - DNA, 84 bp, synthetic construct
  source 1..84: mol_type = other DNA
tttttttaagcagtggtatcaacgcagagtacnngttagacgnncttctagcnntttttttttttttttttttttttttttttt

SEQ ID NO: 9201 - DNA, 84 bp, synthetic construct
  source 1..84: mol_type = other DNA
tttttttaagcagtggtatcaacgcagagtacnngttagacgnngagtaacgnntttttttttttttttttttttttttttttt

SEQ ID NO: 9202 - DNA, 84 bp, synthetic construct
  source 1..84: mol_type = other DNA
tttttttaagcagtggtatcaacgcagagtacnngttagacgnnctaagaggnntttttttttttttttttttttttttttttt

SEQ ID NO: 9203 - DNA, 84 bp, synthetic construct
  source 1..84: mol_type = other DNA
tttttttaagcagtggtatcaacgcagagtacnngttagacgnnacgtgtagnntttttttttttttttttttttttttttttt

SEQ ID NO: 9204 - DNA, 84 bp, synthetic construct
  source 1..84: mol_type = other DNA
tttttttaagcagtggtatcaacgcagagtacnngttagacgnnactacaggnntttttttttttttttttttttttttttttt

SEQ ID NO: 9205 - DNA, 84 bp, synthetic construct
  source 1..84: mol_type = other DNA
tttttttaagcagtggtatcaacgcagagtacnngttagacgnntacaggtcnntttttttttttttttttttttttttttttt

SEQ ID NO: 9206 - DNA, 84 bp, synthetic construct
  source 1..84: mol_type = other DNA
tttttttaagcagtggtatcaacgcagagtacnngttagacgnnctcacatgnntttttttttttttttttttttttttttttt

SEQ ID NO: 9207 - DNA, 84 bp, synthetic construct
  source 1..84: mol_type = other DNA
tttttttaagcagtggtatcaacgcagagtacnngttagacgnnactaggagnntttttttttttttttttttttttttttttt

SEQ ID NO: 9208 - DNA, 84 bp, synthetic construct
  source 1..84: mol_type = other DNA
tttttttaagcagtggtatcaacgcagagtacnngttagacgnnccatagganntttttttttttttttttttttttttttttt

SEQ ID NO: 9209 - DNA, 84 bp, synthetic construct
  source 1..84: mol_type = other DNA
tttttttaagcagtggtatcaacgcagagtacnngttagacgnnggagaatcnntttttttttttttttttttttttttttttt

SEQ ID NO: 9210 - DNA, 84 bp, synthetic construct
  source 1..84: mol_type = other DNA
tttttttaagcagtggtatcaacgcagagtacnngttagacgnngccaagaanntttttttttttttttttttttttttttttt

SEQ ID NO: 9211 - DNA, 84 bp, synthetic construct
  source 1..84: mol_type = other DNA
tttttttaagcagtggtatcaacgcagagtacnngttagacgnnaaggcaagnntttttttttttttttttttttttttttttt

SEQ ID NO: 9212 - DNA, 84 bp, synthetic construct
  source 1..84: mol_type = other DNA
tttttttaagcagtggtatcaacgcagagtacnngttagacgnnaatgtcgcnntttttttttttttttttttttttttttttt

SEQ ID NO: 9213 - DNA, 84 bp, synthetic construct
  source 1..84: mol_type = other DNA
tttttttaagcagtggtatcaacgcagagtacnngttagacgnnatggaaccnntttttttttttttttttttttttttttttt

SEQ ID NO: 9214 - DNA, 84 bp, synthetic construct
  source 1..84: mol_type = other DNA
tttttttaagcagtggtatcaacgcagagtacnngttagacgnnagaggcatnntttttttttttttttttttttttttttttt

SEQ ID NO: 9215 - DNA, 84 bp, synthetic construct
  source 1..84: mol_type = other DNA
tttttttaagcagtggtatcaacgcagagtacnngttagacgnntgcatagcnntttttttttttttttttttttttttttttt

SEQ ID NO: 9216 - DNA, 84 bp, synthetic construct
  source 1..84: mol_type = other DNA
tttttttaagcagtggtatcaacgcagagtacnngttagacgnnctaacgganntttttttttttttttttttttttttttttt

SEQ ID NO: 9217 - DNA, 84 bp, synthetic construct
  source 1..84: mol_type = other DNA
tttttttaagcagtggtatcaacgcagagtacnngttagacgnntatcgaggnntttttttttttttttttttttttttttttt

SEQ ID NO: 9218 - DNA, 84 bp, synthetic construct
  source 1..84: mol_type = other DNA
tttttttaagcagtggtatcaacgcagagtacnngttagacgnncatagcctnntttttttttttttttttttttttttttttt

SEQ ID NO: 9219 - DNA, 84 bp, synthetic construct
  source 1..84: mol_type = other DNA
tttttttaagcagtggtatcaacgcagagtacnngttagacgnnatcgagacnntttttttttttttttttttttttttttttt

SEQ ID NO: 9220 - DNA, 84 bp, synthetic construct
  source 1..84: mol_type = other DNA
tttttttaagcagtggtatcaacgcagagtacnngttagacgnnggaagagtnntttttttttttttttttttttttttttttt

SEQ ID NO: 9221 - DNA, 84 bp, synthetic construct
  source 1..84: mol_type = other DNA
tttttttaagcagtggtatcaacgcagagtacnngttagacgnnccaagtagnntttttttttttttttttttttttttttttt

SEQ ID NO: 9222 - DNA, 84 bp, synthetic construct
  source 1..84: mol_type = other DNA
tttttttaagcagtggtatcaacgcagagtacnngttagacgnnctgaacagnntttttttttttttttttttttttttttttt

SEQ ID NO: 9223 - DNA, 84 bp, synthetic construct
  source 1..84: mol_type = other DNA
tttttttaagcagtggtatcaacgcagagtacnngttagacgnngtaggttcnntttttttttttttttttttttttttttttt

SEQ ID NO: 9224 - DNA, 84 bp, synthetic construct
  source 1..84: mol_type = other DNA
tttttttaagcagtggtatcaacgcagagtacnngttagacgnngtatggacnntttttttttttttttttttttttttttttt

SEQ ID NO: 9225 - DNA, 84 bp, synthetic construct
  source 1..84: mol_type = other DNA
tttttttaagcagtggtatcaacgcagagtacnngttagacgnntcgcaacanntttttttttttttttttttttttttttttt

SEQ ID NO: 9226 - DNA, 84 bp, synthetic construct
  source 1..84: mol_type = other DNA
tttttttaagcagtggtatcaacgcagagtacnngttagacgnnccgctaatnntttttttttttttttttttttttttttttt

SEQ ID NO: 9227 - DNA, 84 bp, synthetic construct
  source 1..84: mol_type = other DNA
tttttttaagcagtggtatcaacgcagagtacnngttagacgnngattcgcanntttttttttttttttttttttttttttttt

SEQ ID NO: 9228 - DNA, 84 bp, synthetic construct
  source 1..84: mol_type = other DNA
tttttttaagcagtggtatcaacgcagagtacnngttagacgnncgatggaanntttttttttttttttttttttttttttttt

SEQ ID NO: 9229 - DNA, 84 bp, synthetic construct
  source 1..84: mol_type = other DNA
tttttttaagcagtggtatcaacgcagagtacnngttagacgnnagcaagganntttttttttttttttttttttttttttttt

SEQ ID NO: 9230 - DNA, 84 bp, synthetic construct
  source 1..84: mol_type = other DNA
tttttttaagcagtggtatcaacgcagagtacnngttagacgnncgtagcaanntttttttttttttttttttttttttttttt

SEQ ID NO: 9231 - DNA, 84 bp, synthetic construct
  source 1..84: mol_type = other DNA
tttttttaagcagtggtatcaacgcagagtacnngttagacgnntggcagtanntttttttttttttttttttttttttttttt

SEQ ID NO: 9232 - DNA, 84 bp, synthetic construct
  source 1..84: mol_type = other DNA
tttttttaagcagtggtatcaacgcagagtacnngttagacgnncggtagttnntttttttttttttttttttttttttttttt

SEQ ID NO: 9233 - DNA, 84 bp, synthetic construct
  source 1..84: mol_type = other DNA
tttttttaagcagtggtatcaacgcagagtacnngttagacgnntgacttcgnntttttttttttttttttttttttttttttt

SEQ ID NO: 9234 - DNA, 84 bp, synthetic construct
  source 1..84: mol_type = other DNA
tttttttaagcagtggtatcaacgcagagtacnngttagacgnngagtgcaanntttttttttttttttttttttttttttttt

SEQ ID NO: 9235 - DNA, 84 bp, synthetic construct
  source 1..84: mol_type = other DNA
tttttttaagcagtggtatcaacgcagagtacnngttagacgnnacggtaacnntttttttttttttttttttttttttttttt

SEQ ID NO: 9236 - DNA, 84 bp, synthetic construct
  source 1..84: mol_type = other DNA
tttttttaagcagtggtatcaacgcagagtacnngttagacgnnaagtggtgnntttttttttttttttttttttttttttttt

SEQ ID NO: 9237 - DNA, 84 bp, synthetic construct
  source 1..84: mol_type = other DNA
tttttttaagcagtggtatcaacgcagagtacnngttagacgnnggagacaanntttttttttttttttttttttttttttttt

SEQ ID NO: 9238 - DNA, 84 bp, synthetic construct
  source 1..84: mol_type = other DNA
tttttttaagcagtggtatcaacgcagagtacnngttagacgnntcaaggacnntttttttttttttttttttttttttttttt

SEQ ID NO: 9239 - DNA, 84 bp, synthetic construct
  source 1..84: mol_type = other DNA
tttttttaagcagtggtatcaacgcagagtacnngttagacgnnaagagagcnntttttttttttttttttttttttttttttt

SEQ ID NO: 9240 - DNA, 84 bp, synthetic construct
  source 1..84: mol_type = other DNA
tttttttaagcagtggtatcaacgcagagtacnngttagacgnncgagagatnntttttttttttttttttttttttttttttt

SEQ ID NO: 9241 - DNA, 84 bp, synthetic construct
  source 1..84: mol_type = other DNA
tttttttaagcagtggtatcaacgcagagtacnngttagacgnnacagatggnntttttttttttttttttttttttttttttt

SEQ ID NO: 9242 - DNA, 84 bp, synthetic construct
  source 1..84: mol_type = other DNA
tttttttaagcagtggtatcaacgcagagtacnngttagacgnnaggagtcanntttttttttttttttttttttttttttttt

SEQ ID NO: 9243 - DNA, 84 bp, synthetic construct
  source 1..84: mol_type = other DNA
tttttttaagcagtggtatcaacgcagagtacnngttagacgnncgtgttacnntttttttttttttttttttttttttttttt

SEQ ID NO: 9244 - DNA, 84 bp, synthetic construct
  source 1..84: mol_type = other DNA
tttttttaagcagtggtatcaacgcagagtacnngttagacgnntagtgtgcnntttttttttttttttttttttttttttttt

SEQ ID NO: 9245 - DNA, 84 bp, synthetic construct
  source 1..84: mol_type = other DNA
tttttttaagcagtggtatcaacgcagagtacnngttagacgnnctcatgacnntttttttttttttttttttttttttttttt

SEQ ID NO: 9246 - DNA, 84 bp, synthetic construct
  source 1..84: mol_type = other DNA
tttttttaagcagtggtatcaacgcagagtacnngttagacgnngtatccagnntttttttttttttttttttttttttttttt

SEQ ID NO: 9247 - DNA, 84 bp, synthetic construct
  source 1..84: mol_type = other DNA
tttttttaagcagtggtatcaacgcagagtacnngttagacgnnacgcctatnntttttttttttttttttttttttttttttt

SEQ ID NO: 9248 - DNA, 84 bp, synthetic construct
  source 1..84: mol_type = other DNA
tttttttaagcagtggtatcaacgcagagtacnngttagacgnnaacgacctnntttttttttttttttttttttttttttttt

SEQ ID NO: 9249 - DNA, 84 bp, synthetic construct
  source 1..84: mol_type = other DNA
tttttttaagcagtggtatcaacgcagagtacnngttagacgnnatcaggctnntttttttttttttttttttttttttttttt

SEQ ID NO: 9250 - DNA, 84 bp, synthetic construct
  source 1..84: mol_type = other DNA
tttttttaagcagtggtatcaacgcagagtacnngttagacgnncaagttcgnntttttttttttttttttttttttttttttt

SEQ ID NO: 9251 - DNA, 84 bp, synthetic construct
  source 1..84: mol_type = other DNA
tttttttaagcagtggtatcaacgcagagtacnngttagacgnntagccaganntttttttttttttttttttttttttttttt

SEQ ID NO: 9252 - DNA, 84 bp, synthetic construct
  source 1..84: mol_type = other DNA
tttttttaagcagtggtatcaacgcagagtacnngttagacgnncaatcacgnntttttttttttttttttttttttttttttt

SEQ ID NO: 9253 - DNA, 84 bp, synthetic construct
  source 1..84: mol_type = other DNA
tttttttaagcagtggtatcaacgcagagtacnngttagacgnngcaacaagnntttttttttttttttttttttttttttttt

SEQ ID NO: 9254 - DNA, 84 bp, synthetic construct
  source 1..84: mol_type = other DNA
tttttttaagcagtggtatcaacgcagagtacnngttagacgnncacgacaanntttttttttttttttttttttttttttttt

SEQ ID NO: 9255 - DNA, 84 bp, synthetic construct
  source 1..84: mol_type = other DNA
tttttttaagcagtggtatcaacgcagagtacnngttagacgnntacggaganntttttttttttttttttttttttttttttt

SEQ ID NO: 9256 - DNA, 84 bp, synthetic construct
  source 1..84: mol_type = other DNA
tttttttaagcagtggtatcaacgcagagtacnngttagacgnncgacaaganntttttttttttttttttttttttttttttt

SEQ ID NO: 9257 - DNA, 84 bp, synthetic construct
  source 1..84: mol_type = other DNA
tttttttaagcagtggtatcaacgcagagtacnngttagacgnncgaagtganntttttttttttttttttttttttttttttt

SEQ ID NO: 9258 - DNA, 84 bp, synthetic construct
  source 1..84: mol_type = other DNA
tttttttaagcagtggtatcaacgcagagtacnngttagacgnnagctggtanntttttttttttttttttttttttttttttt

SEQ ID NO: 9259 - DNA, 84 bp, synthetic construct
  source 1..84: mol_type = other DNA
tttttttaagcagtggtatcaacgcagagtacnngttagacgnnaactaggcnntttttttttttttttttttttttttttttt

SEQ ID NO: 9260 - DNA, 84 bp, synthetic construct
  source 1..84: mol_type = other DNA
tttttttaagcagtggtatcaacgcagagtacnngttagacgnncagcaagtnntttttttttttttttttttttttttttttt

SEQ ID NO: 9261 - DNA, 84 bp, synthetic construct
  source 1..84: mol_type = other DNA
tttttttaagcagtggtatcaacgcagagtacnngttagacgnnacgaggtanntttttttttttttttttttttttttttttt

SEQ ID NO: 9262 - DNA, 84 bp, synthetic construct
  source 1..84: mol_type = other DNA
tttttttaagcagtggtatcaacgcagagtacnngttagacgnncatcttccnntttttttttttttttttttttttttttttt

SEQ ID NO: 9263 - DNA, 84 bp, synthetic construct
  source 1..84: mol_type = other DNA
tttttttaagcagtggtatcaacgcagagtacnngttagacgnncctgaatcnntttttttttttttttttttttttttttttt

SEQ ID NO: 9264 - DNA, 84 bp, synthetic construct
  source 1..84: mol_type = other DNA
tttttttaagcagtggtatcaacgcagagtacnngttagacgnntgcagactnntttttttttttttttttttttttttttttt

SEQ ID NO: 9265 - DNA, 84 bp, synthetic construct
  source 1..84: mol_type = other DNA
tttttttaagcagtggtatcaacgcagagtacnngttagacgnnagatgtggnntttttttttttttttttttttttttttttt

SEQ ID NO: 9266 - DNA, 84 bp, synthetic construct
  source 1..84: mol_type = other DNA
tttttttaagcagtggtatcaacgcagagtacnngttagacgnnagttcgacnntttttttttttttttttttttttttttttt

SEQ ID NO: 9267 - DNA, 84 bp, synthetic construct
  source 1..84: mol_type = other DNA
tttttttaagcagtggtatcaacgcagagtacnngttagacgnnacaacctcnntttttttttttttttttttttttttttttt

SEQ ID NO: 9268 - DNA, 84 bp, synthetic construct
  source 1..84: mol_type = other DNA
tttttttaagcagtggtatcaacgcagagtacnngttagacgnncatggtagnntttttttttttttttttttttttttttttt

SEQ ID NO: 9269 - DNA, 84 bp, synthetic construct
  source 1..84: mol_type = other DNA
tttttttaagcagtggtatcaacgcagagtacnngttagacgnncgtatctcnntttttttttttttttttttttttttttttt

SEQ ID NO: 9270 - DNA, 84 bp, synthetic construct
  source 1..84: mol_type = other DNA
tttttttaagcagtggtatcaacgcagagtacnngttagacgnncctagttcnntttttttttttttttttttttttttttttt

SEQ ID NO: 9271 - DNA, 84 bp, synthetic construct
  source 1..84: mol_type = other DNA
tttttttaagcagtggtatcaacgcagagtacnngttagacgnncaagagtcnntttttttttttttttttttttttttttttt

SEQ ID NO: 9272 - DNA, 84 bp, synthetic construct
  source 1..84: mol_type = other DNA
tttttttaagcagtggtatcaacgcagagtacnnctggtgtannaatcggcanntttttttttttttttttttttttttttttt

SEQ ID NO: 9273 - DNA, 84 bp, synthetic construct
  source 1..84: mol_type = other DNA
tttttttaagcagtggtatcaacgcagagtacnnctggtgtanntacggcatnntttttttttttttttttttttttttttttt

SEQ ID NO: 9274 - DNA, 84 bp, synthetic construct
  source 1..84: mol_type = other DNA
tttttttaagcagtggtatcaacgcagagtacnnctggtgtannttggatcgnntttttttttttttttttttttttttttttt

SEQ ID NO: 9275 - DNA, 84 bp, synthetic construct
  source 1..84: mol_type = other DNA
tttttttaagcagtggtatcaacgcagagtacnnctggtgtanntggaacganntttttttttttttttttttttttttttttt

SEQ ID NO: 9276 - DNA, 84 bp, synthetic construct
  source 1..84: mol_type = other DNA
tttttttaagcagtggtatcaacgcagagtacnnctggtgtannggcaatcanntttttttttttttttttttttttttttttt

SEQ ID NO: 9277 - DNA, 84 bp, synthetic construct
  source 1..84: mol_type = other DNA
tttttttaagcagtggtatcaacgcagagtacnnctggtgtanngaatccganntttttttttttttttttttttttttttttt

SEQ ID NO: 9278 - DNA, 84 bp, synthetic construct
  source 1..84: mol_type = other DNA
tttttttaagcagtggtatcaacgcagagtacnnctggtgtannttacggtgnntttttttttttttttttttttttttttttt

SEQ ID NO: 9279 - DNA, 84 bp, synthetic construct
  source 1..84: mol_type = other DNA
tttttttaagcagtggtatcaacgcagagtacnnctggtgtanncatatcggnntttttttttttttttttttttttttttttt

SEQ ID NO: 9280 - DNA, 84 bp, synthetic construct
  source 1..84: mol_type = other DNA
tttttttaagcagtggtatcaacgcagagtacnnctggtgtanncttcggtanntttttttttttttttttttttttttttttt

SEQ ID NO: 9281 - DNA, 84 bp, synthetic construct
  source 1..84: mol_type = other DNA
tttttttaagcagtggtatcaacgcagagtacnnctggtgtanntcctaacgnntttttttttttttttttttttttttttttt

SEQ ID NO: 9282 - DNA, 84 bp, synthetic construct
  source 1..84: mol_type = other DNA
tttttttaagcagtggtatcaacgcagagtacnnctggtgtanngtaagccanntttttttttttttttttttttttttttttt

SEQ ID NO: 9283 - DNA, 84 bp, synthetic construct
  source 1..84: mol_type = other DNA
tttttttaagcagtggtatcaacgcagagtacnnctggtgtanntaaggtggnntttttttttttttttttttttttttttttt

SEQ ID NO: 9284 - DNA, 84 bp, synthetic construct
  source 1..84: mol_type = other DNA
tttttttaagcagtggtatcaacgcagagtacnnctggtgtannggtaagctnntttttttttttttttttttttttttttttt

SEQ ID NO: 9285 - DNA, 84 bp, synthetic construct
  source 1..84: mol_type = other DNA
tttttttaagcagtggtatcaacgcagagtacnnctggtgtanntgtgtcganntttttttttttttttttttttttttttttt

SEQ ID NO: 9286 - DNA, 84 bp, synthetic construct
  source 1..84: mol_type = other DNA
tttttttaagcagtggtatcaacgcagagtacnnctggtgtanngagcatganntttttttttttttttttttttttttttttt

SEQ ID NO: 9287 - DNA, 84 bp, synthetic construct
  source 1..84: mol_type = other DNA
tttttttaagcagtggtatcaacgcagagtacnnctggtgtanntcgaagtcnntttttttttttttttttttttttttttttt

SEQ ID NO: 9288 - DNA, 84 bp, synthetic construct
  source 1..84: mol_type = other DNA
tttttttaagcagtggtatcaacgcagagtacnnctggtgtannggtgaacanntttttttttttttttttttttttttttttt

SEQ ID NO: 9289 - DNA, 84 bp, synthetic construct
  source 1..84: mol_type = other DNA
tttttttaagcagtggtatcaacgcagagtacnnctggtgtannacatgcacnntttttttttttttttttttttttttttttt

SEQ ID NO: 9290 - DNA, 84 bp, synthetic construct
  source 1..84: mol_type = other DNA
tttttttaagcagtggtatcaacgcagagtacnnctggtgtannccaacagtnntttttttttttttttttttttttttttttt

SEQ ID NO: 9291 - DNA, 84 bp, synthetic construct
  source 1..84: mol_type = other DNA
tttttttaagcagtggtatcaacgcagagtacnnctggtgtannagaacagcnntttttttttttttttttttttttttttttt

SEQ ID NO: 9292 - DNA, 84 bp, synthetic construct
  source 1..84: mol_type = other DNA
tttttttaagcagtggtatcaacgcagagtacnnctggtgtanngaacacgtnntttttttttttttttttttttttttttttt

SEQ ID NO: 9293 - DNA, 84 bp, synthetic construct
  source 1..84: mol_type = other DNA
tttttttaagcagtggtatcaacgcagagtacnnctggtgtannggtcttcanntttttttttttttttttttttttttttttt

SEQ ID NO: 9294 - DNA, 84 bp, synthetic construct
  source 1..84: mol_type = other DNA
tttttttaagcagtggtatcaacgcagagtacnnctggtgtannaggttcagnntttttttttttttttttttttttttttttt

SEQ ID NO: 9295 - DNA, 84 bp, synthetic construct
  source 1..84: mol_type = other DNA
tttttttaagcagtggtatcaacgcagagtacnnctggtgtannctagagcanntttttttttttttttttttttttttttttt

SEQ ID NO: 9296 - DNA, 84 bp, synthetic construct
  source 1..84: mol_type = other DNA
tttttttaagcagtggtatcaacgcagagtacnnctggtgtanncttctagcnntttttttttttttttttttttttttttttt

SEQ ID NO: 9297 - DNA, 84 bp, synthetic construct
  source 1..84: mol_type = other DNA
tttttttaagcagtggtatcaacgcagagtacnnctggtgtanngagtaacgnntttttttttttttttttttttttttttttt

SEQ ID NO: 9298 - DNA, 84 bp, synthetic construct
  source 1..84: mol_type = other DNA
tttttttaagcagtggtatcaacgcagagtacnnctggtgtannctaagaggnntttttttttttttttttttttttttttttt

SEQ ID NO: 9299 - DNA, 84 bp, synthetic construct
  source 1..84: mol_type = other DNA
tttttttaagcagtggtatcaacgcagagtacnnctggtgtannacgtgtagnntttttttttttttttttttttttttttttt

SEQ ID NO: 9300 - DNA, 84 bp, synthetic construct
  source 1..84: mol_type = other DNA
tttttttaagcagtggtatcaacgcagagtacnnctggtgtannactacaggnntttttttttttttttttttttttttttttt

SEQ ID NO: 9301 - DNA, 84 bp, synthetic construct
  source 1..84: mol_type = other DNA
tttttttaagcagtggtatcaacgcagagtacnnctggtgtanntacaggtcnntttttttttttttttttttttttttttttt

SEQ ID NO: 9302 - DNA, 84 bp, synthetic construct
  source 1..84: mol_type = other DNA
tttttttaagcagtggtatcaacgcagagtacnnctggtgtannctcacatgnntttttttttttttttttttttttttttttt

SEQ ID NO: 9303 - DNA, 84 bp, synthetic construct
  source 1..84: mol_type = other DNA
tttttttaagcagtggtatcaacgcagagtacnnctggtgtannactaggagnntttttttttttttttttttttttttttttt

SEQ ID NO: 9304 - DNA, 84 bp, synthetic construct
  source 1..84: mol_type = other DNA
tttttttaagcagtggtatcaacgcagagtacnnctggtgtannccatagganntttttttttttttttttttttttttttttt

SEQ ID NO: 9305 - DNA, 84 bp, synthetic construct
  source 1..84: mol_type = other DNA
tttttttaagcagtggtatcaacgcagagtacnnctggtgtannggagaatcnntttttttttttttttttttttttttttttt

SEQ ID NO: 9306 - DNA, 84 bp, synthetic construct
  source 1..84: mol_type = other DNA
tttttttaagcagtggtatcaacgcagagtacnnctggtgtanngccaagaanntttttttttttttttttttttttttttttt

SEQ ID NO: 9307 - DNA, 84 bp, synthetic construct
  source 1..84: mol_type = other DNA
tttttttaagcagtggtatcaacgcagagtacnnctggtgtannaaggcaagnntttttttttttttttttttttttttttttt

SEQ ID NO: 9308 - DNA, 84 bp, synthetic construct
  source 1..84: mol_type = other DNA
tttttttaagcagtggtatcaacgcagagtacnnctggtgtannaatgtcgcnntttttttttttttttttttttttttttttt

SEQ ID NO: 9309 - DNA, 84 bp, synthetic construct
  source 1..84: mol_type = other DNA
tttttttaagcagtggtatcaacgcagagtacnnctggtgtannatggaaccnntttttttttttttttttttttttttttttt

SEQ ID NO: 9310 - DNA, 84 bp, synthetic construct
  source 1..84: mol_type = other DNA
tttttttaagcagtggtatcaacgcagagtacnnctggtgtannagaggcatnntttttttttttttttttttttttttttttt

SEQ ID NO: 9311 - DNA, 84 bp, synthetic construct
  source 1..84: mol_type = other DNA
tttttttaagcagtggtatcaacgcagagtacnnctggtgtanntgcatagcnntttttttttttttttttttttttttttttt

SEQ ID NO: 9312 - DNA, 84 bp, synthetic construct
  source 1..84: mol_type = other DNA
tttttttaagcagtggtatcaacgcagagtacnnctggtgtannctaacgganntttttttttttttttttttttttttttttt

SEQ ID NO: 9313 - DNA, 84 bp, synthetic construct
  source 1..84: mol_type = other DNA
tttttttaagcagtggtatcaacgcagagtacnnctggtgtanntatcgaggnntttttttttttttttttttttttttttttt

SEQ ID NO: 9314 - DNA, 84 bp, synthetic construct
  source 1..84: mol_type = other DNA
tttttttaagcagtggtatcaacgcagagtacnnctggtgtanncatagcctnntttttttttttttttttttttttttttttt

SEQ ID NO: 9315 - DNA, 84 bp, synthetic construct
  source 1..84: mol_type = other DNA
tttttttaagcagtggtatcaacgcagagtacnnctggtgtannatcgagacnntttttttttttttttttttttttttttttt

SEQ ID NO: 9316 - DNA, 84 bp, synthetic construct
  source 1..84: mol_type = other DNA
tttttttaagcagtggtatcaacgcagagtacnnctggtgtannggaagagtnntttttttttttttttttttttttttttttt

SEQ ID NO: 9317 - DNA, 84 bp, synthetic construct
  source 1..84: mol_type = other DNA
tttttttaagcagtggtatcaacgcagagtacnnctggtgtannccaagtagnntttttttttttttttttttttttttttttt

SEQ ID NO: 9318 - DNA, 84 bp, synthetic construct
  source 1..84: mol_type = other DNA
tttttttaagcagtggtatcaacgcagagtacnnctggtgtannctgaacagnntttttttttttttttttttttttttttttt

SEQ ID NO: 9319 - DNA, 84 bp, synthetic construct
  source 1..84: mol_type = other DNA
tttttttaagcagtggtatcaacgcagagtacnnctggtgtanngtaggttcnntttttttttttttttttttttttttttttt

SEQ ID NO: 9320 - DNA, 84 bp, synthetic construct
  source 1..84: mol_type = other DNA
tttttttaagcagtggtatcaacgcagagtacnnctggtgtanngtatggacnntttttttttttttttttttttttttttttt

SEQ ID NO: 9321 - DNA, 84 bp, synthetic construct
  source 1..84: mol_type = other DNA
tttttttaagcagtggtatcaacgcagagtacnnctggtgtanntcgcaacanntttttttttttttttttttttttttttttt

SEQ ID NO: 9322 - DNA, 84 bp, synthetic construct
  source 1..84: mol_type = other DNA
tttttttaagcagtggtatcaacgcagagtacnnctggtgtannccgctaatnntttttttttttttttttttttttttttttt

SEQ ID NO: 9323 - DNA, 84 bp, synthetic construct
  source 1..84: mol_type = other DNA
tttttttaagcagtggtatcaacgcagagtacnnctggtgtanngattcgcanntttttttttttttttttttttttttttttt

SEQ ID NO: 9324 - DNA, 84 bp, synthetic construct
  source 1..84: mol_type = other DNA
tttttttaagcagtggtatcaacgcagagtacnnctggtgtanncgatggaanntttttttttttttttttttttttttttttt

SEQ ID NO: 9325 - DNA, 84 bp, synthetic construct
  source 1..84: mol_type = other DNA
tttttttaagcagtggtatcaacgcagagtacnnctggtgtannagcaagganntttttttttttttttttttttttttttttt

SEQ ID NO: 9326 - DNA, 84 bp, synthetic construct
  source 1..84: mol_type = other DNA
tttttttaagcagtggtatcaacgcagagtacnnctggtgtanncgtagcaanntttttttttttttttttttttttttttttt

SEQ ID NO: 9327 - DNA, 84 bp, synthetic construct
  source 1..84: mol_type = other DNA
tttttttaagcagtggtatcaacgcagagtacnnctggtgtanntggcagtanntttttttttttttttttttttttttttttt

SEQ ID NO: 9328 - DNA, 84 bp, synthetic construct
  source 1..84: mol_type = other DNA
tttttttaagcagtggtatcaacgcagagtacnnctggtgtanncggtagttnntttttttttttttttttttttttttttttt

SEQ ID NO: 9329 - DNA, 84 bp, synthetic construct
  source 1..84: mol_type = other DNA
tttttttaagcagtggtatcaacgcagagtacnnctggtgtanntgacttcgnntttttttttttttttttttttttttttttt

SEQ ID NO: 9330 - DNA, 84 bp, synthetic construct
  source 1..84: mol_type = other DNA
tttttttaagcagtggtatcaacgcagagtacnnctggtgtanngagtgcaanntttttttttttttttttttttttttttttt

SEQ ID NO: 9331 - DNA, 84 bp, synthetic construct
  source 1..84: mol_type = other DNA
tttttttaagcagtggtatcaacgcagagtacnnctggtgtannacggtaacnntttttttttttttttttttttttttttttt

SEQ ID NO: 9332 - DNA, 84 bp, synthetic construct
  source 1..84: mol_type = other DNA
tttttttaagcagtggtatcaacgcagagtacnnctggtgtannaagtggtgnntttttttttttttttttttttttttttttt

SEQ ID NO: 9333 - DNA, 84 bp, synthetic construct
  source 1..84: mol_type = other DNA
tttttttaagcagtggtatcaacgcagagtacnnctggtgtannggagacaanntttttttttttttttttttttttttttttt

SEQ ID NO: 9334 - DNA, 84 bp, synthetic construct
  source 1..84: mol_type = other DNA
tttttttaagcagtggtatcaacgcagagtacnnctggtgtanntcaaggacnntttttttttttttttttttttttttttttt

SEQ ID NO: 9335 - DNA, 84 bp, synthetic construct
  source 1..84: mol_type = other DNA
tttttttaagcagtggtatcaacgcagagtacnnctggtgtannaagagagcnntttttttttttttttttttttttttttttt

SEQ ID NO: 9336 - DNA, 84 bp, synthetic construct
  source 1..84: mol_type = other DNA
tttttttaagcagtggtatcaacgcagagtacnnctggtgtanncgagagatnntttttttttttttttttttttttttttttt

SEQ ID NO: 9337 - DNA, 84 bp, synthetic construct
  source 1..84: mol_type = other DNA
tttttttaagcagtggtatcaacgcagagtacnnctggtgtannacagatggnntttttttttttttttttttttttttttttt

SEQ ID NO: 9338 - DNA, 84 bp, synthetic construct
  source 1..84: mol_type = other DNA
tttttttaagcagtggtatcaacgcagagtacnnctggtgtannaggagtcanntttttttttttttttttttttttttttttt

SEQ ID NO: 9339 - DNA, 84 bp, synthetic construct
  source 1..84: mol_type = other DNA
tttttttaagcagtggtatcaacgcagagtacnnctggtgtanncgtgttacnntttttttttttttttttttttttttttttt

SEQ ID NO: 9340 - DNA, 84 bp, synthetic construct
  source 1..84: mol_type = other DNA
tttttttaagcagtggtatcaacgcagagtacnnctggtgtanntagtgtgcnntttttttttttttttttttttttttttttt

SEQ ID NO: 9341 - DNA, 84 bp, synthetic construct
  source 1..84: mol_type = other DNA
tttttttaagcagtggtatcaacgcagagtacnnctggtgtannctcatgacnntttttttttttttttttttttttttttttt

SEQ ID NO: 9342 - DNA, 84 bp, synthetic construct
  source 1..84: mol_type = other DNA
tttttttaagcagtggtatcaacgcagagtacnnctggtgtanngtatccagnntttttttttttttttttttttttttttttt

SEQ ID NO: 9343 - DNA, 84 bp, synthetic construct
  source 1..84: mol_type = other DNA
tttttttaagcagtggtatcaacgcagagtacnnctggtgtannacgcctatnntttttttttttttttttttttttttttttt

SEQ ID NO: 9344 - DNA, 84 bp, synthetic construct
  source 1..84: mol_type = other DNA
tttttttaagcagtggtatcaacgcagagtacnnctggtgtannaacgacctnntttttttttttttttttttttttttttttt

SEQ ID NO: 9345 - DNA, 84 bp, synthetic construct
  source 1..84: mol_type = other DNA
tttttttaagcagtggtatcaacgcagagtacnnctggtgtannatcaggctnntttttttttttttttttttttttttttttt

SEQ ID NO: 9346 - DNA, 84 bp, synthetic construct
  source 1..84: mol_type = other DNA
tttttttaagcagtggtatcaacgcagagtacnnctggtgtanncaagttcgnntttttttttttttttttttttttttttttt

SEQ ID NO: 9347 - DNA, 84 bp, synthetic construct
  source 1..84: mol_type = other DNA
tttttttaagcagtggtatcaacgcagagtacnnctggtgtanntagccaganntttttttttttttttttttttttttttttt

SEQ ID NO: 9348 - DNA, 84 bp, synthetic construct
  source 1..84: mol_type = other DNA
tttttttaagcagtggtatcaacgcagagtacnnctggtgtanncaatcacgnntttttttttttttttttttttttttttttt

SEQ ID NO: 9349 - DNA, 84 bp, synthetic construct
  source 1..84: mol_type = other DNA
tttttttaagcagtggtatcaacgcagagtacnnctggtgtanngcaacaagnntttttttttttttttttttttttttttttt

SEQ ID NO: 9350 - DNA, 84 bp, synthetic construct
  source 1..84: mol_type = other DNA
tttttttaagcagtggtatcaacgcagagtacnnctggtgtanncacgacaanntttttttttttttttttttttttttttttt

SEQ ID NO: 9351 - DNA, 84 bp, synthetic construct
  source 1..84: mol_type = other DNA
tttttttaagcagtggtatcaacgcagagtacnnctggtgtanntacggaganntttttttttttttttttttttttttttttt

SEQ ID NO: 9352 - DNA, 84 bp, synthetic construct
  source 1..84: mol_type = other DNA
tttttttaagcagtggtatcaacgcagagtacnnctggtgtanncgacaaganntttttttttttttttttttttttttttttt

SEQ ID NO: 9353 - DNA, 84 bp, synthetic construct
  source 1..84: mol_type = other DNA
tttttttaagcagtggtatcaacgcagagtacnnctggtgtanncgaagtganntttttttttttttttttttttttttttttt

SEQ ID NO: 9354 - DNA, 84 bp, synthetic construct
  source 1..84: mol_type = other DNA
tttttttaagcagtggtatcaacgcagagtacnnctggtgtannagctggtanntttttttttttttttttttttttttttttt

SEQ ID NO: 9355 - DNA, 84 bp, synthetic construct
  source 1..84: mol_type = other DNA
tttttttaagcagtggtatcaacgcagagtacnnctggtgtannaactaggcnntttttttttttttttttttttttttttttt

SEQ ID NO: 9356 - DNA, 84 bp, synthetic construct
  source 1..84: mol_type = other DNA
tttttttaagcagtggtatcaacgcagagtacnnctggtgtanncagcaagtnntttttttttttttttttttttttttttttt

SEQ ID NO: 9357 - DNA, 84 bp, synthetic construct
  source 1..84: mol_type = other DNA
tttttttaagcagtggtatcaacgcagagtacnnctggtgtannacgaggtanntttttttttttttttttttttttttttttt

SEQ ID NO: 9358 - DNA, 84 bp, synthetic construct
  source 1..84: mol_type = other DNA
tttttttaagcagtggtatcaacgcagagtacnnctggtgtanncatcttccnntttttttttttttttttttttttttttttt

SEQ ID NO: 9359 - DNA, 84 bp, synthetic construct
  source 1..84: mol_type = other DNA
tttttttaagcagtggtatcaacgcagagtacnnctggtgtanncctgaatcnntttttttttttttttttttttttttttttt

SEQ ID NO: 9360 - DNA, 84 bp, synthetic construct
  source 1..84: mol_type = other DNA
tttttttaagcagtggtatcaacgcagagtacnnctggtgtanntgcagactnntttttttttttttttttttttttttttttt

SEQ ID NO: 9361 - DNA, 84 bp, synthetic construct
  source 1..84: mol_type = other DNA
tttttttaagcagtggtatcaacgcagagtacnnctggtgtannagatgtggnntttttttttttttttttttttttttttttt

SEQ ID NO: 9362 - DNA, 84 bp, synthetic construct
  source 1..84: mol_type = other DNA
tttttttaagcagtggtatcaacgcagagtacnnctggtgtannagttcgacnntttttttttttttttttttttttttttttt

SEQ ID NO: 9363 - DNA, 84 bp, synthetic construct
  source 1..84: mol_type = other DNA
tttttttaagcagtggtatcaacgcagagtacnnctggtgtannacaacctcnntttttttttttttttttttttttttttttt

SEQ ID NO: 9364 - DNA, 84 bp, synthetic construct
  source 1..84: mol_type = other DNA
tttttttaagcagtggtatcaacgcagagtacnnctggtgtanncatggtagnntttttttttttttttttttttttttttttt

SEQ ID NO: 9365 - DNA, 84 bp, synthetic construct
  source 1..84: mol_type = other DNA
tttttttaagcagtggtatcaacgcagagtacnnctggtgtanncgtatctcnntttttttttttttttttttttttttttttt

SEQ ID NO: 9366 - DNA, 84 bp, synthetic construct
  source 1..84: mol_type = other DNA
tttttttaagcagtggtatcaacgcagagtacnnctggtgtanncctagttcnntttttttttttttttttttttttttttttt

SEQ ID NO: 9367 - DNA, 84 bp, synthetic construct
  source 1..84: mol_type = other DNA
tttttttaagcagtggtatcaacgcagagtacnnctggtgtanncaagagtcnntttttttttttttttttttttttttttttt

SEQ ID NO: 9368 - DNA, 84 bp, synthetic construct
  source 1..84: mol_type = other DNA
tttttttaagcagtggtatcaacgcagagtacnntagacgacnnaatcggcanntttttttttttttttttttttttttttttt

SEQ ID NO: 9369 - DNA, 84 bp, synthetic construct
  source 1..84: mol_type = other DNA
tttttttaagcagtggtatcaacgcagagtacnntagacgacnntacggcatnntttttttttttttttttttttttttttttt

SEQ ID NO: 9370 - DNA, 84 bp, synthetic construct
  source 1..84: mol_type = other DNA
tttttttaagcagtggtatcaacgcagagtacnntagacgacnnttggatcgnntttttttttttttttttttttttttttttt

SEQ ID NO: 9371 - DNA, 84 bp, synthetic construct
  source 1..84: mol_type = other DNA
tttttttaagcagtggtatcaacgcagagtacnntagacgacnntggaacganntttttttttttttttttttttttttttttt

SEQ ID NO: 9372 - DNA, 84 bp, synthetic construct
  source 1..84: mol_type = other DNA
tttttttaagcagtggtatcaacgcagagtacnntagacgacnnggcaatcanntttttttttttttttttttttttttttttt

SEQ ID NO: 9373 - DNA, 84 bp, synthetic construct
  source 1..84: mol_type = other DNA
tttttttaagcagtggtatcaacgcagagtacnntagacgacnngaatccganntttttttttttttttttttttttttttttt

SEQ ID NO: 9374 - DNA, 84 bp, synthetic construct
  source 1..84: mol_type = other DNA
tttttttaagcagtggtatcaacgcagagtacnntagacgacnnttacggtgnntttttttttttttttttttttttttttttt

SEQ ID NO: 9375 - DNA, 84 bp, synthetic construct
  source 1..84: mol_type = other DNA
tttttttaagcagtggtatcaacgcagagtacnntagacgacnncatatcggnntttttttttttttttttttttttttttttt

SEQ ID NO: 9376 - DNA, 84 bp, synthetic construct
  source 1..84: mol_type = other DNA
tttttttaagcagtggtatcaacgcagagtacnntagacgacnncttcggtanntttttttttttttttttttttttttttttt

SEQ ID NO: 9377 - DNA, 84 bp, synthetic construct
  source 1..84: mol_type = other DNA
tttttttaagcagtggtatcaacgcagagtacnntagacgacnntcctaacgnntttttttttttttttttttttttttttttt

SEQ ID NO: 9378 - DNA, 84 bp, synthetic construct
  source 1..84: mol_type = other DNA
tttttttaagcagtggtatcaacgcagagtacnntagacgacnngtaagccanntttttttttttttttttttttttttttttt

SEQ ID NO: 9379 - DNA, 84 bp, synthetic construct
  source 1..84: mol_type = other DNA
tttttttaagcagtggtatcaacgcagagtacnntagacgacnntaaggtggnntttttttttttttttttttttttttttttt

SEQ ID NO: 9380 - DNA, 84 bp, synthetic construct
  source 1..84: mol_type = other DNA
tttttttaagcagtggtatcaacgcagagtacnntagacgacnnggtaagctnntttttttttttttttttttttttttttttt

SEQ ID NO: 9381 - DNA, 84 bp, synthetic construct
  source 1..84: mol_type = other DNA
tttttttaagcagtggtatcaacgcagagtacnntagacgacnntgtgtcganntttttttttttttttttttttttttttttt

SEQ ID NO: 9382 - DNA, 84 bp, synthetic construct
  source 1..84: mol_type = other DNA
tttttttaagcagtggtatcaacgcagagtacnntagacgacnngagcatganntttttttttttttttttttttttttttttt

SEQ ID NO: 9383 - DNA, 84 bp, synthetic construct
  source 1..84: mol_type = other DNA
tttttttaagcagtggtatcaacgcagagtacnntagacgacnntcgaagtcnntttttttttttttttttttttttttttttt

SEQ ID NO: 9384 - DNA, 84 bp, synthetic construct
  source 1..84: mol_type = other DNA
tttttttaagcagtggtatcaacgcagagtacnntagacgacnnggtgaacanntttttttttttttttttttttttttttttt

SEQ ID NO: 9385 - DNA, 84 bp, synthetic construct
  source 1..84: mol_type = other DNA
tttttttaagcagtggtatcaacgcagagtacnntagacgacnnacatgcacnntttttttttttttttttttttttttttttt

SEQ ID NO: 9386 - DNA, 84 bp, synthetic construct
  source 1..84: mol_type = other DNA
tttttttaagcagtggtatcaacgcagagtacnntagacgacnnccaacagtnntttttttttttttttttttttttttttttt

SEQ ID NO: 9387 - DNA, 84 bp, synthetic construct
  source 1..84: mol_type = other DNA
tttttttaagcagtggtatcaacgcagagtacnntagacgacnnagaacagcnntttttttttttttttttttttttttttttt

SEQ ID NO: 9388 - DNA, 84 bp, synthetic construct
  source 1..84: mol_type = other DNA
tttttttaagcagtggtatcaacgcagagtacnntagacgacnngaacacgtnntttttttttttttttttttttttttttttt

SEQ ID NO: 9389 - DNA, 84 bp, synthetic construct
  source 1..84: mol_type = other DNA
tttttttaagcagtggtatcaacgcagagtacnntagacgacnnggtcttcanntttttttttttttttttttttttttttttt

SEQ ID NO: 9390 - DNA, 84 bp, synthetic construct
  source 1..84: mol_type = other DNA
tttttttaagcagtggtatcaacgcagagtacnntagacgacnnaggttcagnntttttttttttttttttttttttttttttt

SEQ ID NO: 9391 - DNA, 84 bp, synthetic construct
  source 1..84: mol_type = other DNA
tttttttaagcagtggtatcaacgcagagtacnntagacgacnnctagagcanntttttttttttttttttttttttttttttt

SEQ ID NO: 9392 - DNA, 84 bp, synthetic construct
  source 1..84: mol_type = other DNA
tttttttaagcagtggtatcaacgcagagtacnntagacgacnncttctagcnntttttttttttttttttttttttttttttt

SEQ ID NO: 9393 - DNA, 84 bp, synthetic construct
  source 1..84: mol_type = other DNA
tttttttaagcagtggtatcaacgcagagtacnntagacgacnngagtaacgnntttttttttttttttttttttttttttttt

SEQ ID NO: 9394 - DNA, 84 bp, synthetic construct
  source 1..84: mol_type = other DNA
tttttttaagcagtggtatcaacgcagagtacnntagacgacnnctaagaggnntttttttttttttttttttttttttttttt

SEQ ID NO: 9395 - DNA, 84 bp, synthetic construct
  source 1..84: mol_type = other DNA
tttttttaagcagtggtatcaacgcagagtacnntagacgacnnacgtgtagnntttttttttttttttttttttttttttttt

SEQ ID NO: 9396 - DNA, 84 bp, synthetic construct
  source 1..84: mol_type = other DNA
tttttttaagcagtggtatcaacgcagagtacnntagacgacnnactacaggnntttttttttttttttttttttttttttttt

SEQ ID NO: 9397 - DNA, 84 bp, synthetic construct
  source 1..84: mol_type = other DNA
tttttttaagcagtggtatcaacgcagagtacnntagacgacnntacaggtcnntttttttttttttttttttttttttttttt

SEQ ID NO: 9398 - DNA, 84 bp, synthetic construct
  source 1..84: mol_type = other DNA
tttttttaagcagtggtatcaacgcagagtacnntagacgacnnctcacatgnntttttttttttttttttttttttttttttt

SEQ ID NO: 9399 - DNA, 84 bp, synthetic construct
  source 1..84: mol_type = other DNA
tttttttaagcagtggtatcaacgcagagtacnntagacgacnnactaggagnntttttttttttttttttttttttttttttt

SEQ ID NO: 9400 - DNA, 84 bp, synthetic construct
  source 1..84: mol_type = other DNA
tttttttaagcagtggtatcaacgcagagtacnntagacgacnnccatagganntttttttttttttttttttttttttttttt

SEQ ID NO: 9401 - DNA, 84 bp, synthetic construct
  source 1..84: mol_type = other DNA
tttttttaagcagtggtatcaacgcagagtacnntagacgacnnggagaatcnntttttttttttttttttttttttttttttt

SEQ ID NO: 9402 - DNA, 84 bp, synthetic construct
  source 1..84: mol_type = other DNA
tttttttaagcagtggtatcaacgcagagtacnntagacgacnngccaagaanntttttttttttttttttttttttttttttt

SEQ ID NO: 9403 - DNA, 84 bp, synthetic construct
  source 1..84: mol_type = other DNA
tttttttaagcagtggtatcaacgcagagtacnntagacgacnnaaggcaagnntttttttttttttttttttttttttttttt

SEQ ID NO: 9404 - DNA, 84 bp, synthetic construct
  source 1..84: mol_type = other DNA
tttttttaagcagtggtatcaacgcagagtacnntagacgacnnaatgtcgcnntttttttttttttttttttttttttttttt

SEQ ID NO: 9405 - DNA, 84 bp, synthetic construct
  source 1..84: mol_type = other DNA
tttttttaagcagtggtatcaacgcagagtacnntagacgacnnatggaaccnntttttttttttttttttttttttttttttt

SEQ ID NO: 9406 - DNA, 84 bp, synthetic construct
  source 1..84: mol_type = other DNA
tttttttaagcagtggtatcaacgcagagtacnntagacgacnnagaggcatnntttttttttttttttttttttttttttttt

SEQ ID NO: 9407 - DNA, 84 bp, synthetic construct
  source 1..84: mol_type = other DNA
tttttttaagcagtggtatcaacgcagagtacnntagacgacnntgcatagcnntttttttttttttttttttttttttttttt

SEQ ID NO: 9408 - DNA, 84 bp, synthetic construct
  source 1..84: mol_type = other DNA
tttttttaagcagtggtatcaacgcagagtacnntagacgacnnctaacgganntttttttttttttttttttttttttttttt

SEQ ID NO: 9409 - DNA, 84 bp, synthetic construct
  source 1..84: mol_type = other DNA
tttttttaagcagtggtatcaacgcagagtacnntagacgacnntatcgaggnntttttttttttttttttttttttttttttt

SEQ ID NO: 9410 - DNA, 84 bp, synthetic construct
  source 1..84: mol_type = other DNA
tttttttaagcagtggtatcaacgcagagtacnntagacgacnncatagcctnntttttttttttttttttttttttttttttt

SEQ ID NO: 9411 - DNA, 84 bp, synthetic construct
  source 1..84: mol_type = other DNA
tttttttaagcagtggtatcaacgcagagtacnntagacgacnnatcgagacnntttttttttttttttttttttttttttttt

SEQ ID NO: 9412 - DNA, 84 bp, synthetic construct
  source 1..84: mol_type = other DNA
tttttttaagcagtggtatcaacgcagagtacnntagacgacnnggaagagtnntttttttttttttttttttttttttttttt

SEQ ID NO: 9413 - DNA, 84 bp, synthetic construct
  source 1..84: mol_type = other DNA
tttttttaagcagtggtatcaacgcagagtacnntagacgacnnccaagtagnntttttttttttttttttttttttttttttt

SEQ ID NO: 9414 - DNA, 84 bp, synthetic construct
  source 1..84: mol_type = other DNA
tttttttaagcagtggtatcaacgcagagtacnntagacgacnnctgaacagnntttttttttttttttttttttttttttttt

SEQ ID NO: 9415 - DNA, 84 bp, synthetic construct
  source 1..84: mol_type = other DNA
tttttttaagcagtggtatcaacgcagagtacnntagacgacnngtaggttcnntttttttttttttttttttttttttttttt

SEQ ID NO: 9416 - DNA, 84 bp, synthetic construct
  source 1..84: mol_type = other DNA
tttttttaagcagtggtatcaacgcagagtacnntagacgacnngtatggacnntttttttttttttttttttttttttttttt

SEQ ID NO: 9417 - DNA, 84 bp, synthetic construct
  source 1..84: mol_type = other DNA
tttttttaagcagtggtatcaacgcagagtacnntagacgacnntcgcaacanntttttttttttttttttttttttttttttt

SEQ ID NO: 9418 - DNA, 84 bp, synthetic construct
  source 1..84: mol_type = other DNA
tttttttaagcagtggtatcaacgcagagtacnntagacgacnnccgctaatnntttttttttttttttttttttttttttttt

SEQ ID NO: 9419 - DNA, 84 bp, synthetic construct
  source 1..84: mol_type = other DNA
tttttttaagcagtggtatcaacgcagagtacnntagacgacnngattcgcanntttttttttttttttttttttttttttttt

SEQ ID NO: 9420 - DNA, 84 bp, synthetic construct
  source 1..84: mol_type = other DNA
tttttttaagcagtggtatcaacgcagagtacnntagacgacnncgatggaanntttttttttttttttttttttttttttttt

SEQ ID NO: 9421 - DNA, 84 bp, synthetic construct
  source 1..84: mol_type = other DNA
tttttttaagcagtggtatcaacgcagagtacnntagacgacnnagcaagganntttttttttttttttttttttttttttttt

SEQ ID NO: 9422 - DNA, 84 bp, synthetic construct
  source 1..84: mol_type = other DNA
tttttttaagcagtggtatcaacgcagagtacnntagacgacnncgtagcaanntttttttttttttttttttttttttttttt

SEQ ID NO: 9423 - DNA, 84 bp, synthetic construct
  source 1..84: mol_type = other DNA
tttttttaagcagtggtatcaacgcagagtacnntagacgacnntggcagtanntttttttttttttttttttttttttttttt

SEQ ID NO: 9424 - DNA, 84 bp, synthetic construct
  source 1..84: mol_type = other DNA
tttttttaagcagtggtatcaacgcagagtacnntagacgacnncggtagttnntttttttttttttttttttttttttttttt

SEQ ID NO: 9425 - DNA, 84 bp, synthetic construct
  source 1..84: mol_type = other DNA
tttttttaagcagtggtatcaacgcagagtacnntagacgacnntgacttcgnntttttttttttttttttttttttttttttt

SEQ ID NO: 9426 - DNA, 84 bp, synthetic construct
  source 1..84: mol_type = other DNA
tttttttaagcagtggtatcaacgcagagtacnntagacgacnngagtgcaanntttttttttttttttttttttttttttttt

SEQ ID NO: 9427 - DNA, 84 bp, synthetic construct
  source 1..84: mol_type = other DNA
tttttttaagcagtggtatcaacgcagagtacnntagacgacnnacggtaacnntttttttttttttttttttttttttttttt

SEQ ID NO: 9428 - DNA, 84 bp, synthetic construct
  source 1..84: mol_type = other DNA
tttttttaagcagtggtatcaacgcagagtacnntagacgacnnaagtggtgnntttttttttttttttttttttttttttttt

SEQ ID NO: 9429 - DNA, 84 bp, synthetic construct
  source 1..84: mol_type = other DNA
tttttttaagcagtggtatcaacgcagagtacnntagacgacnnggagacaanntttttttttttttttttttttttttttttt

SEQ ID NO: 9430 - DNA, 84 bp, synthetic construct
  source 1..84: mol_type = other DNA
tttttttaagcagtggtatcaacgcagagtacnntagacgacnntcaaggacnntttttttttttttttttttttttttttttt

SEQ ID NO: 9431 - DNA, 84 bp, synthetic construct
  source 1..84: mol_type = other DNA
tttttttaagcagtggtatcaacgcagagtacnntagacgacnnaagagagcnntttttttttttttttttttttttttttttt

SEQ ID NO: 9432 - DNA, 84 bp, synthetic construct
  source 1..84: mol_type = other DNA
tttttttaagcagtggtatcaacgcagagtacnntagacgacnncgagagatnntttttttttttttttttttttttttttttt

SEQ ID NO: 9433 - DNA, 84 bp, synthetic construct
  source 1..84: mol_type = other DNA
tttttttaagcagtggtatcaacgcagagtacnntagacgacnnacagatggnntttttttttttttttttttttttttttttt

SEQ ID NO: 9434 - DNA, 84 bp, synthetic construct
  source 1..84: mol_type = other DNA
tttttttaagcagtggtatcaacgcagagtacnntagacgacnnaggagtcanntttttttttttttttttttttttttttttt

SEQ ID NO: 9435 - DNA, 84 bp, synthetic construct
  source 1..84: mol_type = other DNA
tttttttaagcagtggtatcaacgcagagtacnntagacgacnncgtgttacnntttttttttttttttttttttttttttttt

SEQ ID NO: 9436 - DNA, 84 bp, synthetic construct
  source 1..84: mol_type = other DNA
tttttttaagcagtggtatcaacgcagagtacnntagacgacnntagtgtgcnntttttttttttttttttttttttttttttt

SEQ ID NO: 9437 - DNA, 84 bp, synthetic construct
  source 1..84: mol_type = other DNA
tttttttaagcagtggtatcaacgcagagtacnntagacgacnnctcatgacnntttttttttttttttttttttttttttttt

SEQ ID NO: 9438 - DNA, 84 bp, synthetic construct
  source 1..84: mol_type = other DNA
tttttttaagcagtggtatcaacgcagagtacnntagacgacnngtatccagnntttttttttttttttttttttttttttttt

SEQ ID NO: 9439 - DNA, 84 bp, synthetic construct
  source 1..84: mol_type = other DNA
tttttttaagcagtggtatcaacgcagagtacnntagacgacnnacgcctatnntttttttttttttttttttttttttttttt

SEQ ID NO: 9440 - DNA, 84 bp, synthetic construct
  source 1..84: mol_type = other DNA
tttttttaagcagtggtatcaacgcagagtacnntagacgacnnaacgacctnntttttttttttttttttttttttttttttt

SEQ ID NO: 9441 - DNA, 84 bp, synthetic construct
  source 1..84: mol_type = other DNA
tttttttaagcagtggtatcaacgcagagtacnntagacgacnnatcaggctnntttttttttttttttttttttttttttttt

SEQ ID NO: 9442 - DNA, 84 bp, synthetic construct
  source 1..84: mol_type = other DNA
tttttttaagcagtggtatcaacgcagagtacnntagacgacnncaagttcgnntttttttttttttttttttttttttttttt

SEQ ID NO: 9443 - DNA, 84 bp, synthetic construct
  source 1..84: mol_type = other DNA
tttttttaagcagtggtatcaacgcagagtacnntagacgacnntagccaganntttttttttttttttttttttttttttttt

SEQ ID NO: 9444 - DNA, 84 bp, synthetic construct
  source 1..84: mol_type = other DNA
tttttttaagcagtggtatcaacgcagagtacnntagacgacnncaatcacgnntttttttttttttttttttttttttttttt

SEQ ID NO: 9445 - DNA, 84 bp, synthetic construct
  source 1..84: mol_type = other DNA
tttttttaagcagtggtatcaacgcagagtacnntagacgacnngcaacaagnntttttttttttttttttttttttttttttt

SEQ ID NO: 9446 - DNA, 84 bp, synthetic construct
  source 1..84: mol_type = other DNA
tttttttaagcagtggtatcaacgcagagtacnntagacgacnncacgacaanntttttttttttttttttttttttttttttt

SEQ ID NO: 9447 - DNA, 84 bp, synthetic construct
  source 1..84: mol_type = other DNA
tttttttaagcagtggtatcaacgcagagtacnntagacgacnntacggaganntttttttttttttttttttttttttttttt

SEQ ID NO: 9448 - DNA, 84 bp, synthetic construct
  source 1..84: mol_type = other DNA
tttttttaagcagtggtatcaacgcagagtacnntagacgacnncgacaaganntttttttttttttttttttttttttttttt

SEQ ID NO: 9449 - DNA, 84 bp, synthetic construct
  source 1..84: mol_type = other DNA
tttttttaagcagtggtatcaacgcagagtacnntagacgacnncgaagtganntttttttttttttttttttttttttttttt

SEQ ID NO: 9450 - DNA, 84 bp, synthetic construct
  source 1..84: mol_type = other DNA
tttttttaagcagtggtatcaacgcagagtacnntagacgacnnagctggtanntttttttttttttttttttttttttttttt

SEQ ID NO: 9451 - DNA, 84 bp, synthetic construct
  source 1..84: mol_type = other DNA
tttttttaagcagtggtatcaacgcagagtacnntagacgacnnaactaggcnntttttttttttttttttttttttttttttt

SEQ ID NO: 9452 - DNA, 84 bp, synthetic construct
  source 1..84: mol_type = other DNA
tttttttaagcagtggtatcaacgcagagtacnntagacgacnncagcaagtnntttttttttttttttttttttttttttttt

SEQ ID NO: 9453 - DNA, 84 bp, synthetic construct
  source 1..84: mol_type = other DNA
tttttttaagcagtggtatcaacgcagagtacnntagacgacnnacgaggtanntttttttttttttttttttttttttttttt

SEQ ID NO: 9454 - DNA, 84 bp, synthetic construct
  source 1..84: mol_type = other DNA
tttttttaagcagtggtatcaacgcagagtacnntagacgacnncatcttccnntttttttttttttttttttttttttttttt

SEQ ID NO: 9455 - DNA, 84 bp, synthetic construct
  source 1..84: mol_type = other DNA
tttttttaagcagtggtatcaacgcagagtacnntagacgacnncctgaatcnntttttttttttttttttttttttttttttt

SEQ ID NO: 9456 - DNA, 84 bp, synthetic construct
  source 1..84: mol_type = other DNA
tttttttaagcagtggtatcaacgcagagtacnntagacgacnntgcagactnntttttttttttttttttttttttttttttt

SEQ ID NO: 9457 - DNA, 84 bp, synthetic construct
  source 1..84: mol_type = other DNA
tttttttaagcagtggtatcaacgcagagtacnntagacgacnnagatgtggnntttttttttttttttttttttttttttttt

SEQ ID NO: 9458 - DNA, 84 bp, synthetic construct
  source 1..84: mol_type = other DNA
tttttttaagcagtggtatcaacgcagagtacnntagacgacnnagttcgacnntttttttttttttttttttttttttttttt

SEQ ID NO: 9459 - DNA, 84 bp, synthetic construct
  source 1..84: mol_type = other DNA
tttttttaagcagtggtatcaacgcagagtacnntagacgacnnacaacctcnntttttttttttttttttttttttttttttt

SEQ ID NO: 9460 - DNA, 84 bp, synthetic construct
  source 1..84: mol_type = other DNA
tttttttaagcagtggtatcaacgcagagtacnntagacgacnncatggtagnntttttttttttttttttttttttttttttt

SEQ ID NO: 9461 - DNA, 84 bp, synthetic construct
  source 1..84: mol_type = other DNA
tttttttaagcagtggtatcaacgcagagtacnntagacgacnncgtatctcnntttttttttttttttttttttttttttttt

SEQ ID NO: 9462 - DNA, 84 bp, synthetic construct
  source 1..84: mol_type = other DNA
tttttttaagcagtggtatcaacgcagagtacnntagacgacnncctagttcnntttttttttttttttttttttttttttttt

SEQ ID NO: 9463 - DNA, 84 bp, synthetic construct
  source 1..84: mol_type = other DNA
tttttttaagcagtggtatcaacgcagagtacnntagacgacnncaagagtcnntttttttttttttttttttttttttttttt

SEQ ID NO: 9464 - DNA, 54 bp, synthetic construct
  source 1..54: mol_type = other DNA
aggtaaggtaatacgactcactataggggttcagagttctacagtccgacgatc

SEQ ID NO: 9465 - DNA, 42 bp, synthetic construct
  source 1..42: mol_type = other DNA
gccttggcacccgagaattccannnnnnnncgtgatnnnnnn

SEQ ID NO: 9466 - DNA, 42 bp, synthetic construct
  source 1..42: mol_type = other DNA
gccttggcacccgagaattccannnnnnnnacatcgnnnnnn

SEQ ID NO: 9467 - DNA, 42 bp, synthetic construct
  source 1..42: mol_type = other DNA
gccttggcacccgagaattccannnnnnnngcctaannnnnn

SEQ ID NO: 9468 - DNA, 42 bp, synthetic construct
  source 1..42: mol_type = other DNA
gccttggcacccgagaattccannnnnnnntggtcannnnnn

SEQ ID NO: 9469 - DNA, 42 bp, synthetic construct
  source 1..42: mol_type = other DNA
gccttggcacccgagaattccannnnnnnncactgtnnnnnn

SEQ ID NO: 9470 - DNA, 50 bp, synthetic construct
  source 1..50: mol_type = other DNA
aatgatacggcgaccaccgagatctacacgttcagagttctacagtccga

SEQ ID NO: 9471 - DNA, 63 bp, synthetic construct
  source 1..63: mol_type = other DNA
caagcagaagacggcatacgagatcgtgatgtgactggagttccttggcacccgagaattcca

SEQ ID NO: 9472 - DNA, 41 bp, synthetic construct
  source 1..41: mol_type = other DNA
caggtcaaccagagagatcgtcggactgtagaactctgaac

SEQ ID NO: 9473 - DNA, 41 bp, synthetic construct
  source 1..41: mol_type = other DNA
caggtcaaagtacgcgatcgtcggactgtagaactctgaac

SEQ ID NO: 9474 - DNA, 41 bp, synthetic construct
  source 1..41: mol_type = other DNA
caggtcgtttggcatgatcgtcggactgtagaactctgaac

SEQ ID NO: 9475 - DNA, 41 bp, synthetic construct
  source 1..41: mol_type = other DNA
caggtcaagtgaggtgatcgtcggactgtagaactctgaac

SEQ ID NO: 9476 - DNA, 41 bp, synthetic construct
  source 1..41: mol_type = other DNA
caggtcacgttagctgatcgtcggactgtagaactctgaac

SEQ ID NO: 9477 - DNA, 41 bp, synthetic construct
  source 1..41: mol_type = other DNA
caggtcgtgctagaggatcgtcggactgtagaactctgaac

SEQ ID NO: 9478 - DNA, 41 bp, synthetic construct
  source 1..41: mol_type = other DNA
caggtcgtcctgtgtgatcgtcggactgtagaactctgaac

SEQ ID NO: 9479 - DNA, 41 bp, synthetic construct
  source 1..41: mol_type = other DNA
caggtctctacggcagatcgtcggactgtagaactctgaac

SEQ ID NO: 9480 - DNA, 41 bp, synthetic construct
  source 1..41: mol_type = other DNA
caggtcacagggcttgatcgtcggactgtagaactctgaac

SEQ ID NO: 9481 - DNA, 41 bp, synthetic construct
  source 1..41: mol_type = other DNA
caggtcgtgcgttatgatcgtcggactgtagaactctgaac

SEQ ID NO: 9482 - DNA, 41 bp, synthetic construct
  source 1..41: mol_type = other DNA
caggtcgggtaagtagatcgtcggactgtagaactctgaac

SEQ ID NO: 9483 - DNA, 41 bp, synthetic construct
  source 1..41: mol_type = other DNA
caggtctcccttagggatcgtcggactgtagaactctgaac

SEQ ID NO: 9484 - DNA, 41 bp, synthetic construct
  source 1..41: mol_type = other DNA
caggtccaagttggtgatcgtcggactgtagaactctgaac

SEQ ID NO: 9485 - DNA, 41 bp, synthetic construct
  source 1..41: mol_type = other DNA
caggtcttctcactcgatcgtcggactgtagaactctgaac

SEQ ID NO: 9486 - DNA, 41 bp, synthetic construct
  source 1..41: mol_type = other DNA
caggtctcccactctgatcgtcggactgtagaactctgaac

SEQ ID NO: 9487 - DNA, 41 bp, synthetic construct
  source 1..41: mol_type = other DNA
caggtccggtataccgatcgtcggactgtagaactctgaac

SEQ ID NO: 9488 - DNA, 41 bp, synthetic construct
  source 1..41: mol_type = other DNA
caggtcaggcatgtggatcgtcggactgtagaactctgaac

SEQ ID NO: 9489 - DNA, 41 bp, synthetic construct
  source 1..41: mol_type = other DNA
caggtccccagattggatcgtcggactgtagaactctgaac

SEQ ID NO: 9490 - DNA, 41 bp, synthetic construct
  source 1..41: mol_type = other DNA
caggtcttcccttgagatcgtcggactgtagaactctgaac

SEQ ID NO: 9491 - DNA, 41 bp, synthetic construct
  source 1..41: mol_type = other DNA
caggtcgttgtacgagatcgtcggactgtagaactctgaac

SEQ ID NO: 9492 - DNA, 41 bp, synthetic construct
  source 1..41: mol_type = other DNA
caggtctgcttgcaggatcgtcggactgtagaactctgaac

SEQ ID NO: 9493 - DNA, 41 bp, synthetic construct
  source 1..41: mol_type = other DNA
caggtcggcctcattgatcgtcggactgtagaactctgaac

SEQ ID NO: 9494 - DNA, 41 bp, synthetic construct
  source 1..41: mol_type = other DNA
caggtcaacagcctagatcgtcggactgtagaactctgaac

SEQ ID NO: 9495 - DNA, 41 bp, synthetic construct
  source 1..41: mol_type = other DNA
caggtcgatgcaatggatcgtcggactgtagaactctgaac

SEQ ID NO: 9496 - DNA, 41 bp, synthetic construct
  source 1..41: mol_type = other DNA
caggtcgaaggaacggatcgtcggactgtagaactctgaac

SEQ ID NO: 9497 - DNA, 41 bp, synthetic construct
  source 1..41: mol_type = other DNA
caggtccagccacttgatcgtcggactgtagaactctgaac

SEQ ID NO: 9498 - DNA, 41 bp, synthetic construct
  source 1..41: mol_type = other DNA
caggtcctctgcttcgatcgtcggactgtagaactctgaac

SEQ ID NO: 9499 - DNA, 41 bp, synthetic construct
  source 1..41: mol_type = other DNA
caggtcggcttatgagatcgtcggactgtagaactctgaac

SEQ ID NO: 9500 - DNA, 41 bp, synthetic construct
  source 1..41: mol_type = other DNA
caggtcctagtcctcgatcgtcggactgtagaactctgaac

SEQ ID NO: 9501 - DNA, 41 bp, synthetic construct
  source 1..41: mol_type = other DNA
caggtcctagaggaggatcgtcggactgtagaactctgaac

SEQ ID NO: 9502 - DNA, 41 bp, synthetic construct
  source 1..41: mol_type = other DNA
caggtcagctttaccgatcgtcggactgtagaactctgaac

SEQ ID NO: 9503 - DNA, 41 bp, synthetic construct
  source 1..41: mol_type = other DNA
caggtcgtccatgaagatcgtcggactgtagaactctgaac

SEQ ID NO: 9504 - DNA, 41 bp, synthetic construct
  source 1..41: mol_type = other DNA
caggtcctcgaacctgatcgtcggactgtagaactctgaac

SEQ ID NO: 9505 - DNA, 41 bp, synthetic construct
  source 1..41: mol_type = other DNA
caggtccattgtacggatcgtcggactgtagaactctgaac

SEQ ID NO: 9506 - DNA, 41 bp, synthetic construct
  source 1..41: mol_type = other DNA
caggtcttgaacgctgatcgtcggactgtagaactctgaac

SEQ ID NO: 9507 - DNA, 41 bp, synthetic construct
  source 1..41: mol_type = other DNA
caggtctacgtcatggatcgtcggactgtagaactctgaac

SEQ ID NO: 9508 - DNA, 41 bp, synthetic construct
  source 1..41: mol_type = other DNA
caggtcaagccgttagatcgtcggactgtagaactctgaac

SEQ ID NO: 9509 - DNA, 41 bp, synthetic construct
  source 1..41: mol_type = other DNA
caggtccggacgtatgatcgtcggactgtagaactctgaac

SEQ ID NO: 9510 - DNA, 41 bp, synthetic construct
  source 1..41: mol_type = other DNA
caggtctcgttaccggatcgtcggactgtagaactctgaac

SEQ ID NO: 9511 - DNA, 41 bp, synthetic construct
  source 1..41: mol_type = other DNA
caggtcatcccccatgatcgtcggactgtagaactctgaac

SEQ ID NO: 9512 - DNA, 41 bp, synthetic construct
  source 1..41: mol_type = other DNA
caggtccagacgattgatcgtcggactgtagaactctgaac

SEQ ID NO: 9513 - DNA, 41 bp, synthetic construct
  source 1..41: mol_type = other DNA
caggtcatcgatcccgatcgtcggactgtagaactctgaac

SEQ ID NO: 9514 - DNA, 41 bp, synthetic construct
  source 1..41: mol_type = other DNA
caggtccctgaggatgatcgtcggactgtagaactctgaac

SEQ ID NO: 9515 - DNA, 41 bp, synthetic construct
  source 1..41: mol_type = other DNA
caggtcagctctttggatcgtcggactgtagaactctgaac

SEQ ID NO: 9516 - DNA, 41 bp, synthetic construct
  source 1..41: mol_type = other DNA
caggtcggaatacgggatcgtcggactgtagaactctgaac

SEQ ID NO: 9517 - DNA, 41 bp, synthetic construct
  source 1..41: mol_type = other DNA
caggtcctatcctgggatcgtcggactgtagaactctgaac

SEQ ID NO: 9518 - DNA, 41 bp, synthetic construct
  source 1..41: mol_type = other DNA
caggtcggttgtagtgatcgtcggactgtagaactctgaac

SEQ ID NO: 9519 - DNA, 41 bp, synthetic construct
  source 1..41: mol_type = other DNA
caggtcgaacgtagcgatcgtcggactgtagaactctgaac

SEQ ID NO: 9520 - DNA, 40 bp, synthetic construct
  source 1..40: mol_type = other DNA
caggtcgtctatcggatcgtcggactgtagaactctgaac

SEQ ID NO: 9521 - DNA, 40 bp, synthetic construct
  source 1..40: mol_type = other DNA
caggtctacgagtggatcgtcggactgtagaactctgaac

SEQ ID NO: 9522 - DNA, 40 bp, synthetic construct
  source 1..40: mol_type = other DNA
caggtctcatgtcggatcgtcggactgtagaactctgaac

SEQ ID NO: 9523 - DNA, 40 bp, synthetic construct
  source 1..40: mol_type = other DNA
caggtcaaacacccgatcgtcggactgtagaactctgaac

SEQ ID NO: 9524 - DNA, 40 bp, synthetic construct
  source 1..40: mol_type = other DNA
caggtcactagtccgatcgtcggactgtagaactctgaac

SEQ ID NO: 9525 - DNA, 40 bp, synthetic construct
  source 1..40: mol_type = other DNA
caggtccgaggaatgatcgtcggactgtagaactctgaac

SEQ ID NO: 9526 - DNA, 40 bp, synthetic construct
  source 1..40: mol_type = other DNA
caggtcacaatggcgatcgtcggactgtagaactctgaac

SEQ ID NO: 9527 - DNA, 40 bp, synthetic construct
  source 1..40: mol_type = other DNA
caggtctaggtctcgatcgtcggactgtagaactctgaac

SEQ ID NO: 9528 - DNA, 40 bp, synthetic construct
  source 1..40: mol_type = other DNA
caggtctctgtgaggatcgtcggactgtagaactctgaac

SEQ ID NO: 9529 - DNA, 40 bp, synthetic construct
  source 1..40: mol_type = other DNA
caggtcgggattgagatcgtcggactgtagaactctgaac

SEQ ID NO: 9530 - DNA, 40 bp, synthetic construct
  source 1..40: mol_type = other DNA
caggtcaactctgggatcgtcggactgtagaactctgaac

SEQ ID NO: 9531 - DNA, 40 bp, synthetic construct
  source 1..40: mol_type = other DNA
caggtcaaacgcgtgatcgtcggactgtagaactctgaac

SEQ ID NO: 9532 - DNA, 40 bp, synthetic construct
  source 1..40: mol_type = other DNA
caggtctcctacgagatcgtcggactgtagaactctgaac

SEQ ID NO: 9533 - DNA, 40 bp, synthetic construct
  source 1..40: mol_type = other DNA
caggtctagcaggtgatcgtcggactgtagaactctgaac

SEQ ID NO: 9534 - DNA, 40 bp, synthetic construct
  source 1..40: mol_type = other DNA
caggtccctgcattgatcgtcggactgtagaactctgaac

SEQ ID NO: 9535 - DNA, 40 bp, synthetic construct
  source 1..40: mol_type = other DNA
caggtcgtgatgcagatcgtcggactgtagaactctgaac

SEQ ID NO: 9536 - DNA, 40 bp, synthetic construct
  source 1..40: mol_type = other DNA
caggtccgattcaggatcgtcggactgtagaactctgaac

SEQ ID NO: 9537 - DNA, 40 bp, synthetic construct
  source 1..40: mol_type = other DNA
caggtcaggatgacgatcgtcggactgtagaactctgaac

SEQ ID NO: 9538 - DNA, 40 bp, synthetic construct
  source 1..40: mol_type = other DNA
caggtcaggccatagatcgtcggactgtagaactctgaac

SEQ ID NO: 9539 - DNA, 40 bp, synthetic construct
  source 1..40: mol_type = other DNA
caggtcgcttgcttgatcgtcggactgtagaactctgaac

SEQ ID NO: 9540 - DNA, 40 bp, synthetic construct
  source 1..40: mol_type = other DNA
caggtctcccaagtgatcgtcggactgtagaactctgaac

SEQ ID NO: 9541 - DNA, 40 bp, synthetic construct
  source 1..40: mol_type = other DNA
caggtctcaaggcagatcgtcggactgtagaactctgaac

SEQ ID NO: 9542 - DNA, 40 bp, synthetic construct
  source 1..40: mol_type = other DNA
caggtcacgaggtagatcgtcggactgtagaactctgaac

SEQ ID NO: 9543 - DNA, 40 bp, synthetic construct
  source 1..40: mol_type = other DNA
caggtcggaacgaagatcgtcggactgtagaactctgaac

SEQ ID NO: 9544 - DNA, 40 bp, synthetic construct
  source 1..40: mol_type = other DNA
caggtcaatcccaggatcgtcggactgtagaactctgaac

SEQ ID NO: 9545 - DNA, 40 bp, synthetic construct
  source 1..40: mol_type = other DNA
caggtccgataagggatcgtcggactgtagaactctgaac

SEQ ID NO: 9546 - DNA, 40 bp, synthetic construct
  source 1..40: mol_type = other DNA
caggtctatcgcgagatcgtcggactgtagaactctgaac

SEQ ID NO: 9547 - DNA, 40 bp, synthetic construct
  source 1..40: mol_type = other DNA
caggtccgcataacgatcgtcggactgtagaactctgaac

SEQ ID NO: 9548 - DNA, 40 bp, synthetic construct
  source 1..40: mol_type = other DNA
caggtcgtgcagttgatcgtcggactgtagaactctgaac

SEQ ID NO: 9549 - DNA, 40 bp, synthetic construct
  source 1..40: mol_type = other DNA
caggtcagaacgctgatcgtcggactgtagaactctgaac

SEQ ID NO: 9550 - DNA, 40 bp, synthetic construct
  source 1..40: mol_type = other DNA
caggtctagaggtcgatcgtcggactgtagaactctgaac

SEQ ID NO: 9551 - DNA, 40 bp, synthetic construct
  source 1..40: mol_type = other DNA
caggtcctgtgatggatcgtcggactgtagaactctgaac

SEQ ID NO: 9552 - DNA, 40 bp, synthetic construct
  source 1..40: mol_type = other DNA
caggtctagagccagatcgtcggactgtagaactctgaac

SEQ ID NO: 9553 - DNA, 40 bp, synthetic construct
  source 1..40: mol_type = other DNA
caggtccttgatgcgatcgtcggactgtagaactctgaac

SEQ ID NO: 9554 - DNA, 40 bp, synthetic construct
  source 1..40: mol_type = other DNA
caggtcttcgtgtcgatcgtcggactgtagaactctgaac

SEQ ID NO: 9555 - DNA, 40 bp, synthetic construct
  source 1..40: mol_type = other DNA
caggtctatctgcggatcgtcggactgtagaactctgaac

SEQ ID NO: 9556 - DNA, 40 bp, synthetic construct
  source 1..40: mol_type = other DNA
caggtctggtaggagatcgtcggactgtagaactctgaac

SEQ ID NO: 9557 - DNA, 40 bp, synthetic construct
  source 1..40: mol_type = other DNA
caggtccctagacagatcgtcggactgtagaactctgaac

SEQ ID NO: 9558 - DNA, 40 bp, synthetic construct
  source 1..40: mol_type = other DNA
caggtcagtcaacggatcgtcggactgtagaactctgaac

SEQ ID NO: 9559 - DNA, 40 bp, synthetic construct
  source 1..40: mol_type = other DNA
caggtcaagggtgagatcgtcggactgtagaactctgaac

SEQ ID NO: 9560 - DNA, 40 bp, synthetic construct
  source 1..40: mol_type = other DNA
caggtccttcacacgatcgtcggactgtagaactctgaac

SEQ ID NO: 9561 - DNA, 40 bp, synthetic construct
  source 1..40: mol_type = other DNA
caggtcaggttgctgatcgtcggactgtagaactctgaac

SEQ ID NO: 9562 - DNA, 40 bp, synthetic construct
  source 1..40: mol_type = other DNA
caggtcacccgaaagatcgtcggactgtagaactctgaac

SEQ ID NO: 9563 - DNA, 40 bp, synthetic construct
  source 1..40: mol_type = other DNA
caggtcgaaaaggggatcgtcggactgtagaactctgaac

SEQ ID NO: 9564 - DNA, 40 bp, synthetic construct
  source 1..40: mol_type = other DNA
caggtcacttcccagatcgtcggactgtagaactctgaac

SEQ ID NO: 9565 - DNA, 40 bp, synthetic construct
  source 1..40: mol_type = other DNA
caggtctgctgcatgatcgtcggactgtagaactctgaac

SEQ ID NO: 9566 - DNA, 40 bp, synthetic construct
  source 1..40: mol_type = other DNA
caggtcattcctgggatcgtcggactgtagaactctgaac

SEQ ID NO: 9567 - DNA, 40 bp, synthetic construct
  source 1..40: mol_type = other DNA
caggtccagaactcgatcgtcggactgtagaactctgaac

SEQ ID NO: 9568 - DNA, 68 bp, synthetic construct
  source 1..68: mol_type = other DNA
aaaaaaaaaaaaaaaaaaaaaaaaaggtgatacaggtcaaaaaaaaagatcgtcggactgtagaactc

SEQ ID NO: 9569 - DNA, 68 bp, synthetic construct
  source 1..68: mol_type = other DNA
aaaaaaaaaaaaaaaaaaaaaaaaatgaatgccaggtcaaaaaaaaagatcgtcggactgtagaactc

SEQ ID NO: 9570 - DNA, 68 bp, synthetic construct
  source 1..68: mol_type = other DNA
aaaaaaaaaaaaaaaaaaaaaaaaatgccaaacaggtcaaaaaaaaagatcgtcggactgtagaactc

SEQ ID NO: 9571 - DNA, 68 bp, synthetic construct
  source 1..68: mol_type = other DNA
aaaaaaaaaaaaaaaaaaaaaaaaaacagaagcaggtcaaaaaaaaagatcgtcggactgtagaactc

SEQ ID NO: 9572 - DNA, 68 bp, synthetic construct
  source 1..68: mol_type = other DNA
aaaaaaaaaaaaaaaaaaaaaaaaacactggacaggtcaaaaaaaaagatcgtcggactgtagaactc

SEQ ID NO: 9573 - DNA, 68 bp, synthetic construct
  source 1..68: mol_type = other DNA
aaaaaaaaaaaaaaaaaaaaaaaaacgatgatcaggtcaaaaaaaaagatcgtcggactgtagaactc

SEQ ID NO: 9574 - DNA, 68 bp, synthetic construct
  source 1..68: mol_type = other DNA
aaaaaaaaaaaaaaaaaaaaaaaaagtgtccacaggtcaaaaaaaaagatcgtcggactgtagaactc

SEQ ID NO: 9575 - DNA, 68 bp, synthetic construct
  source 1..68: mol_type = other DNA
aaaaaaaaaaaaaaaaaaaaaaaaatcctcttcaggtcaaaaaaaaagatcgtcggactgtagaactc

SEQ ID NO: 9576 - DNA, 68 bp, synthetic construct
  source 1..68: mol_type = other DNA
aaaaaaaaaaaaaaaaaaaaaaaaagtgcagtcaggtcaaaaaaaaagatcgtcggactgtagaactc

SEQ ID NO: 9577 - DNA, 68 bp, synthetic construct
  source 1..68: mol_type = other DNA
aaaaaaaaaaaaaaaaaaaaaaaaaaggtagacaggtcaaaaaaaaagatcgtcggactgtagaactc

SEQ ID NO: 9578 - DNA, 54 bp, synthetic construct; identical to SEQ ID NO: 9464
  source 1..54: mol_type = other DNA

SEQ ID NO: 9579 - DNA, 42 bp, synthetic construct
  source 1..42: mol_type = other DNA
gccttggcacccgagaattccannnnnnnncgtcatnnnnnn

SEQ ID NO: 9580 - DNA, 42 bp, synthetic construct
  source 1..42: mol_type = other DNA
gccttggcacccgagaattccannnnnnnntacccannnnnn

SEQ ID NO: 9581 - DNA, 42 bp, synthetic construct
  source 1..42: mol_type = other DNA
gccttggcacccgagaattccannnnnnnngccattnnnnnn

SEQ ID NO: 9582 - DNA, 42 bp, synthetic construct
  source 1..42: mol_type = other DNA
gccttggcacccgagaattccannnnnnnngagtacnnnnnn

SEQ ID NO: 9583 - DNA, 42 bp, synthetic construct
  source 1..42: mol_type = other DNA
gccttggcacccgagaattccannnnnnnnagagtcnnnnnn

SEQ ID NO: 9584 - DNA, 50 bp, synthetic construct; identical to SEQ ID NO: 9470
  source 1..50: mol_type = other DNA

SEQ ID NO: 9585 - DNA, 63 bp, synthetic construct
  source 1..63: mol_type = other DNA
caagcagaagacggcatacgagatacatcggtgactggagttccttggcacccgagaattcca

SEQ ID NO: 9586 - DNA, 41 bp, synthetic construct
  source 1..41: mol_type = other DNA
caggtcctgatcgatgatcgtcggactgtagaactctgaac

SEQ ID NO: 9587 - DNA, 41 bp, synthetic construct
  source 1..41: mol_type = other DNA
caggtcgtgtagacagatcgtcggactgtagaactctgaac

SEQ ID NO: 9588 - DNA, 41 bp, synthetic construct
  source 1..41: mol_type = other DNA
caggtccattgttccgatcgtcggactgtagaactctgaac

SEQ ID NO: 9589 - DNA, 41 bp, synthetic construct
  source 1..41: mol_type = other DNA
caggtccttgactacgatcgtcggactgtagaactctgaac

SEQ ID NO: 9590 - DNA, 41 bp, synthetic construct
  source 1..41: mol_type = other DNA
caggtcaccgtttcggatcgtcggactgtagaactctgaac

SEQ ID NO: 9591 - DNA, 41 bp, synthetic construct
  source 1..41: mol_type = other DNA
caggtcaaggaccgtgatcgtcggactgtagaactctgaac

SEQ ID NO: 9592 - DNA, 41 bp, synthetic construct
  source 1..41: mol_type = other DNA
caggtctcactatgcgatcgtcggactgtagaactctgaac

SEQ ID NO: 9593 - DNA, 41 bp, synthetic construct
  source 1..41: mol_type = other DNA
caggtcctgcaatgggatcgtcggactgtagaactctgaac

SEQ ID NO: 9594 - DNA, 41 bp, synthetic construct
  source 1..41: mol_type = other DNA
caggtctgagtcgtcgatcgtcggactgtagaactctgaac

SEQ ID NO: 9595 - DNA, 41 bp, synthetic construct
  source 1..41: mol_type = other DNA
caggtcctcacactagatcgtcggactgtagaactctgaac

SEQ ID NO: 9596 - DNA, 41 bp, synthetic construct
  source 1..41: mol_type = other DNA
caggtcttaccccctgatcgtcggactgtagaactctgaac

SEQ ID NO: 9597 - DNA, 41 bp, synthetic construct
  source 1..41: mol_type = other DNA
caggtcccaagtagagatcgtcggactgtagaactctgaac

SEQ ID NO: 9598 - DNA, 41 bp, synthetic construct
  source 1..41: mol_type = other DNA
caggtcatagcgcacgatcgtcggactgtagaactctgaac

SEQ ID NO: 9599 - DNA, 41 bp, synthetic construct
  source 1..41: mol_type = other DNA
caggtctgacgtacggatcgtcggactgtagaactctgaac

SEQ ID NO: 9600 - DNA, 41 bp, synthetic construct
  source 1..41: mol_type = other DNA
caggtcgtagagttggatcgtcggactgtagaactctgaac

SEQ ID NO: 9601 - DNA, 41 bp, synthetic construct
  source 1..41: mol_type = other DNA
caggtctttctggcggatcgtcggactgtagaactctgaac

SEQ ID NO: 9602 - DNA, 41 bp, synthetic construct
  source 1..41: mol_type = other DNA
caggtcggaatgtgtgatcgtcggactgtagaactctgaac

SEQ ID NO: 9603 - DNA, 41 bp, synthetic construct
  source 1..41: mol_type = other DNA
caggtcctatggaaggatcgtcggactgtagaactctgaac

SEQ ID NO: 9604 - DNA, 41 bp, synthetic construct
  source 1..41: mol_type = other DNA
caggtcaagtccatggatcgtcggactgtagaactctgaac

SEQ ID NO: 9605 - DNA, 41 bp, synthetic construct
  source 1..41: mol_type = other DNA
caggtcagtacttgggatcgtcggactgtagaactctgaac

SEQ ID NO: 9606 - DNA, 41 bp, synthetic construct
  source 1..41: mol_type = other DNA
caggtcacaggactagatcgtcggactgtagaactctgaac

SEQ ID NO: 9607 - DNA, 41 bp, synthetic construct
  source 1..41: mol_type = other DNA
caggtcaccaggtaagatcgtcggactgtagaactctgaac

SEQ ID NO: 9608 - DNA, 41 bp, synthetic construct
  source 1..41: mol_type = other DNA
caggtcgcatgaaccgatcgtcggactgtagaactctgaac

SEQ ID NO: 9609 - DNA, 41 bp, synthetic construct
  source 1..41: mol_type = other DNA
caggtcgttggtgttgatcgtcggactgtagaactctgaac

SEQ ID NO: 9610 - DNA, 41 bp, synthetic construct
  source 1..41: mol_type = other DNA
caggtcccttcagacgatcgtcggactgtagaactctgaac

SEQ ID NO: 9611 - DNA, 41 bp, synthetic construct
  source 1..41: mol_type = other DNA
caggtccctcttggtgatcgtcggactgtagaactctgaac

SEQ ID NO: 9612 - DNA, 41 bp, synthetic construct
  source 1..41: mol_type = other DNA
caggtcgggaaagttgatcgtcggactgtagaactctgaac

SEQ ID NO: 9613 - DNA, 41 bp, synthetic construct
  source 1..41: mol_type = other DNA
caggtcagccagagtgatcgtcggactgtagaactctgaac

SEQ ID NO: 9614 - DNA, 41 bp, synthetic construct
  source 1..41: mol_type = other DNA
caggtctcgcatctggatcgtcggactgtagaactctgaac

SEQ ID NO: 9615 - DNA, 41 bp, synthetic construct
  source 1..41: mol_type = other DNA
caggtcgatacggcagatcgtcggactgtagaactctgaac

SEQ ID NO: 9616 - DNA, 41 bp, synthetic construct
  source 1..41: mol_type = other DNA
caggtctcggccaaagatcgtcggactgtagaactctgaac

SEQ ID NO: 9617 - DNA, 41 bp, synthetic construct
  source 1..41: mol_type = other DNA
caggtcagatttcgcgatcgtcggactgtagaactctgaac

SEQ ID NO: 9618 - DNA, 41 bp, synthetic construct
  source 1..41: mol_type = other DNA
caggtcgaccctcaagatcgtcggactgtagaactctgaac

SEQ ID NO: 9619 - DNA, 41 bp, synthetic construct
  source 1..41: mol_type = other DNA
caggtcagtccactcgatcgtcggactgtagaactctgaac

SEQ ID NO: 9620 - DNA, 41 bp, synthetic construct
  source 1..41: mol_type = other DNA
caggtccaaacgatcgatcgtcggactgtagaactctgaac

SEQ ID NO: 9621 - DNA, 41 bp, synthetic construct
  source 1..41: mol_type = other DNA
caggtcgcctaataggatcgtcggactgtagaactctgaac

SEQ ID NO: 9622 - DNA, 41 bp, synthetic construct
  source 1..41: mol_type = other DNA
caggtcggctacatcgatcgtcggactgtagaactctgaac

SEQ ID NO: 9623 - DNA, 41 bp, synthetic construct
  source 1..41: mol_type = other DNA
caggtctatgagcaggatcgtcggactgtagaactctgaac

SEQ ID NO: 9624 - DNA, 41 bp, synthetic construct
  source 1..41: mol_type = other DNA
caggtcggtagtaacgatcgtcggactgtagaactctgaac

SEQ ID NO: 9625 - DNA, 41 bp, synthetic construct
  source 1..41: mol_type = other DNA
caggtccgcgtatatgatcgtcggactgtagaactctgaac

SEQ ID NO: 9626 - DNA, 41 bp, synthetic construct
  source 1..41: mol_type = other DNA
caggtctactggagcgatcgtcggactgtagaactctgaac

SEQ ID NO: 9627 - DNA, 41 bp, synthetic construct
  source 1..41: mol_type = other DNA
caggtcagggaatcagatcgtcggactgtagaactctgaac

SEQ ID NO: 9628 - DNA, 41 bp, synthetic construct
  source 1..41: mol_type = other DNA
caggtcatccgagatgatcgtcggactgtagaactctgaac

SEQ ID NO: 9629 - DNA, 41 bp, synthetic construct
  source 1..41: mol_type = other DNA
caggtctcccaagcagatcgtcggactgtagaactctgaac

SEQ ID NO: 9630 - DNA, 41 bp, synthetic construct
  source 1..41: mol_type = other DNA
caggtcgagccgtttgatcgtcggactgtagaactctgaac

SEQ ID NO: 9631 - DNA, 41 bp, synthetic construct
  source 1..41: mol_type = other DNA
caggtctgctcttacgatcgtcggactgtagaactctgaac

SEQ ID NO: 9632 - DNA, 41 bp, synthetic construct
  source 1..41: mol_type = other DNA
caggtcacgactaccgatcgtcggactgtagaactctgaac

SEQ ID NO: 9633 - DNA, 41 bp, synthetic construct
  source 1..41: mol_type = other DNA
caggtccaagcagctgatcgtcggactgtagaactctgaac

SEQ ID NO: 9634 - DNA, 40 bp, synthetic construct
  source 1..40: mol_type = other DNA
caggtcgtattcgcgatcgtcggactgtagaactctgaac

SEQ ID NO: 9635 - DNA, 40 bp, synthetic construct
  source 1..40: mol_type = other DNA
caggtcgctctgaagatcgtcggactgtagaactctgaac

SEQ ID NO: 9636 - DNA, 40 bp, synthetic construct
  source 1..40: mol_type = other DNA
caggtcacgtagtggatcgtcggactgtagaactctgaac

SEQ ID NO: 9637 - DNA, 40 bp, synthetic construct
  source 1..40: mol_type = other DNA
caggtcattgggtcgatcgtcggactgtagaactctgaac

SEQ ID NO: 9638 - DNA, 40 bp, synthetic construct
  source 1..40: mol_type = other DNA
caggtcaacagcacgatcgtcggactgtagaactctgaac

SEQ ID NO: 9639 - DNA, 40 bp, synthetic construct
  source 1..40: mol_type = other DNA
caggtctcagagacgatcgtcggactgtagaactctgaac

SEQ ID NO: 9640 - DNA, 40 bp, synthetic construct
  source 1..40: mol_type = other DNA
caggtcgtgtgctagatcgtcggactgtagaactctgaac

SEQ ID NO: 9641 - DNA, 40 bp, synthetic construct
  source 1..40: mol_type = other DNA
caggtcgcagttgagatcgtcggactgtagaactctgaac

SEQ ID NO: 9642 - DNA, 40 bp, synthetic construct
  source 1..40: mol_type = other DNA
caggtcttaacggggatcgtcggactgtagaactctgaac

SEQ ID NO: 9643 - DNA, 40 bp, synthetic construct
  source 1..40: mol_type = other DNA
caggtcgctcgattgatcgtcggactgtagaactctgaac

SEQ ID NO: 9644 - DNA, 40 bp, synthetic construct
  source 1..40: mol_type = other DNA
caggtcacacctgtgatcgtcggactgtagaactctgaac

SEQ ID NO: 9645 - DNA, 40 bp, synthetic construct
  source 1..40: mol_type = other DNA
caggtcagacggttgatcgtcggactgtagaactctgaac

SEQ ID NO: 9646 - DNA, 40 bp, synthetic construct
  source 1..40: mol_type = other DNA
caggtcgcaaaccagatcgtcggactgtagaactctgaac

SEQ ID NO: 9647 - DNA, 40 bp, synthetic construct
  source 1..40: mol_type = other DNA
caggtcgagtatgggatcgtcggactgtagaactctgaac

SEQ ID NO: 9648 - DNA, 40 bp, synthetic construct
  source 1..40: mol_type = other DNA
caggtcggtctttcgatcgtcggactgtagaactctgaac

SEQ ID NO: 9649 - DNA, 40 bp, synthetic construct
  source 1..40: mol_type = other DNA
caggtccatctgctgatcgtcggactgtagaactctgaac

SEQ ID NO: 9650 - DNA, 40 bp, synthetic construct
  source 1..40: mol_type = other DNA
caggtcttcgcaaggatcgtcggactgtagaactctgaac

SEQ ID NO: 9651 - DNA, 40 bp, synthetic construct
  source 1..40: mol_type = other DNA
caggtcttgtgacggatcgtcggactgtagaactctgaac

SEQ ID NO: 9652 - DNA, 40 bp, synthetic construct
  source 1..40: mol_type = other DNA
caggtctgcatgacgatcgtcggactgtagaactctgaac

SEQ ID NO: 9653 - DNA, 40 bp, synthetic construct
  source 1..40: mol_type = other DNA
caggtccaacgtgagatcgtcggactgtagaactctgaac

SEQ ID NO: 9654 - DNA, 40 bp, synthetic construct
  source 1..40: mol_type = other DNA
caggtctaggcttcgatcgtcggactgtagaactctgaac

SEQ ID NO: 9655 - DNA, 40 bp, synthetic construct; identical to SEQ ID NO: 9556
  source 1..40: mol_type = other DNA

SEQ ID NO: 9656 - DNA, 40 bp, synthetic construct
  source 1..40: mol_type = other DNA
caggtctgcagcttgatcgtcggactgtagaactctgaac

SEQ ID NO: 9657 - DNA, 40 bp, synthetic construct
  source 1..40: mol_type = other DNA
caggtcctgtacctgatcgtcggactgtagaactctgaac

SEQ ID NO: 9658 - DNA, 40 bp, synthetic construct
  source 1..40: mol_type = other DNA
caggtccgcaatgagatcgtcggactgtagaactctgaac

SEQ ID NO: 9659 - DNA, 40 bp, synthetic construct
  source 1..40: mol_type = other DNA
caggtcgatccaaggatcgtcggactgtagaactctgaac

SEQ ID NO: 9660 - DNA, 40 bp, synthetic construct
  source 1..40: mol_type = other DNA
caggtccacttacggatcgtcggactgtagaactctgaac

SEQ ID NO: 9661 - DNA, 40 bp, synthetic construct
  source 1..40: mol_type = other DNA
caggtcaactaggcgatcgtcggactgtagaactctgaac

SEQ ID NO: 9662 - DNA, 40 bp, synthetic construct
  source 1..40: mol_type = other DNA
caggtcactagcgtgatcgtcggactgtagaactctgaac

SEQ ID NO: 9663 - DNA, 40 bp, synthetic construct
  source 1..40: mol_type = other DNA
caggtccgttcgttgatcgtcggactgtagaactctgaac

SEQ ID NO: 9664 - DNA, 40 bp, synthetic construct
  source 1..40: mol_type = other DNA
caggtcagtcacgagatcgtcggactgtagaactctgaac

SEQ ID NO: 9665 - DNA, 40 bp, synthetic construct
  source 1..40: mol_type = other DNA
caggtccctgtaacgatcgtcggactgtagaactctgaac

SEQ ID NO: 9666 - DNA, 40 bp, synthetic construct
  source 1..40: mol_type = other DNA
caggtcgtcctcttgatcgtcggactgtagaactctgaac

SEQ ID NO: 9667 - DNA, 40 bp, synthetic construct
  source 1..40: mol_type = other DNA
caggtccagcgaatgatcgtcggactgtagaactctgaac

SEQ ID NO: 9668 - DNA, 40 bp, synthetic construct
  source 1..40: mol_type = other DNA
caggtcatggttgggatcgtcggactgtagaactctgaac

SEQ ID NO: 9669 - DNA, 40 bp, synthetic construct
  source 1..40: mol_type = other DNA
caggtcgaggttctgatcgtcggactgtagaactctgaac

SEQ ID NO: 9670 - DNA, 40 bp, synthetic construct
  source 1..40: mol_type = other DNA
caggtctacctcgagatcgtcggactgtagaactctgaac

SEQ ID NO: 9671 - DNA, 40 bp, synthetic construct
  source 1..40: mol_type = other DNA
caggtcttctgtgcgatcgtcggactgtagaactctgaac

SEQ ID NO: 9672 - DNA, 40 bp, synthetic construct
  source 1..40: mol_type = other DNA
caggtcgacaactggatcgtcggactgtagaactctgaac

SEQ ID NO: 9673 - DNA, 40 bp, synthetic construct
  source 1..40: mol_type = other DNA
caggtccgacaacagatcgtcggactgtagaactctgaac

SEQ ID NO: 9674 - DNA, 40 bp, synthetic construct
  source 1..40: mol_type = other DNA
caggtctcgataccgatcgtcggactgtagaactctgaac

SEQ ID NO: 9675 - DNA, 40 bp, synthetic construct
  source 1..40: mol_type = other DNA
caggtcccatactcgatcgtcggactgtagaactctgaac

SEQ ID NO: 9676 - DNA, 40 bp, synthetic construct
  source 1..40: mol_type = other DNA
caggtcattcgcaggatcgtcggactgtagaactctgaac

SEQ ID NO: 9677 - DNA, 40 bp, synthetic construct
  source 1..40: mol_type = other DNA
caggtcaccatagggatcgtcggactgtagaactctgaac

SEQ ID NO: 9678 - DNA, 40 bp, synthetic construct
  source 1..40: mol_type = other DNA
caggtccgatcaaggatcgtcggactgtagaactctgaac

SEQ ID NO: 9679 - DNA, 40 bp, synthetic construct
  source 1..40: mol_type = other DNA
caggtcaccttgctgatcgtcggactgtagaactctgaac

SEQ ID NO: 9680 - DNA, 40 bp, synthetic construct
  source 1..40: mol_type = other DNA
caggtcgactcagtgatcgtcggactgtagaactctgaac

SEQ ID NO: 9681 - DNA, 40 bp, synthetic construct
  source 1..40: mol_type = other DNA
caggtcgtcaatccgatcgtcggactgtagaactctgaac

SEQ ID NO: 9682 - DNA, 68 bp, synthetic construct; identical to SEQ ID NO: 9568
  source 1..68: mol_type = other DNA

SEQ ID NO: 9683 - DNA, 68 bp, synthetic construct; identical to SEQ ID NO: 9569
  source 1..68: mol_type = other DNA

SEQ ID NO: 9684 - DNA, 68 bp, synthetic construct; identical to SEQ ID NO: 9570
  source 1..68: mol_type = other DNA

SEQ ID NO: 9685 - DNA, 68 bp, synthetic construct; identical to SEQ ID NO: 9571
  source 1..68: mol_type = other DNA

SEQ ID NO: 9686 - DNA, 68 bp, synthetic construct; identical to SEQ ID NO: 9572
  source 1..68: mol_type = other DNA

SEQ ID NO: 9687 - DNA, 68 bp, synthetic construct; identical to SEQ ID NO: 9573
  source 1..68: mol_type = other DNA

SEQ ID NO: 9688 - DNA, 68 bp, synthetic construct; identical to SEQ ID NO: 9574
  source 1..68: mol_type = other DNA

SEQ ID NO: 9689 - DNA, 68 bp, synthetic construct; identical to SEQ ID NO: 9575
  source 1..68: mol_type = other DNA

SEQ ID NO: 9690 - DNA, 68 bp, synthetic construct; identical to SEQ ID NO: 9576
  source 1..68: mol_type = other DNA

SEQ ID NO: 9691 - DNA, 68 bp, synthetic construct; identical to SEQ ID NO: 9577
  source 1..68: mol_type = other DNA

SEQ ID NO: 9692 - DNA, 66 bp, synthetic construct
  source 1..66: mol_type = other DNA
aatgatacggcgaccaccgagatctacacgcctgtccgcggaagcagtggtatcaacgcagagtac

SEQ ID NO: 9693 - DNA, 37 bp, synthetic construct
  source 1..37: mol_type = other DNA
gcctgtccgcggaagcagtggtatcaacgcagagtac

SEQ ID NO: 9694 - DNA, 30 bp, synthetic construct
  source 1..30: mol_type = other DNA
aagcagtggtatcaacgcagagtgaatggg

SEQ ID NO: 9695 - DNA, 37 bp, synthetic construct; identical to SEQ ID NO: 9693
  source 1..37: mol_type = other DNA

SEQ ID NO: 9696 - DNA, 68 bp, synthetic construct
  source 1..68: mol_type = other DNA
tttttttaagcagtggtatcaacgcagagtacnnnnnntttttttttttttttttttttttttttttt
